(19) United States
(12) Patent Application Publication
(10) Pub. No.: US 2004/0087478 A1
(43) Pub. Date: May 6, 2004

(54) Screening method

(76) Inventors: Clemens Gillen, Aachen (DE); Ingrid Wetzels, Aachen (DE); Stephan Wnendt, Aachen (DE); E. Weihe, Marburg (DE); M.K.-H. Schaefer, Marburg (DE)

Correspondence Address: CROWELL & MORING LLP, INTELLECTUAL PROPERTY GROUP, P.O. BOX 14300, WASHINGTON, DC, 20044-4300, US

(21) Appl. No.: 10/343,710

(22) PCT Filed: Aug. 3, 2001
(86) PCT No.: PCT/EP01/09011

(51) Int. Cl. C12Q 1/68; G01N 33/53; A61K 31/00

(52) U.S. Cl. 514/1; 435/6; 435/7.1

(57) ABSTRACT

The invention relates to a method for discovering pain-relevant or pain-regulating substances, associated polynucleotides, peptides, proteins, vectors and cells, to compounds identified thereby, corresponding medicaments, diagnostic reagents, and to their use in pain therapy.

[0001] The invention relates to a method for discovering pain-relevant substances, associated polynucleotides, peptides, proteins, vectors and cells, to compounds identified thereby, corresponding medicaments, diagnostic reagents, and to the use thereof in pain therapy.

[0002] Various medicaments are available for the treatment of pain such as, e.g., acetylsalicylic acid, paracetamol, dipyrone, tramadol, morphine und fentanyl, but also substances such as amitryptiline und ketamine are used for treating patients suffering from pain. Often, however, especially in chronic pain states, no lasting improvement can be achieved for patients in spite of increasingly refined treatment schemes. One of the reasons for this is the fact that in chronic pain permanent changes take place in the nerve cells involved.

[0003] Pain research in recent years has led to the fundamental recognition that plastic changes in the nervous system cause the development, of chronic pain in particular, especially changes in the nociceptive neurones of the dorsal root ganglia and the neurones in the region of the dorsal horns of the spinal chord (for an overview see: Coderre et al. 1993; Zimmermann & Herdegen, 1996). Neuronal plasticity is accompanied by changes in the expression of certain genes and leads to long-term change in the phenotype of the affected neurones. Hitherto the concept of neuronal plasticity has been applied, primarily, to developmental, learning and regeneration processes, but the most recent findings in pain research show that this concept applies also in pathophysiological processes (Tölle, 1997).

[0004] Chronification of pain is already relatively well characterised in animal experiments on a phenomenological level. The induction of chronic pain states leads to the following changes:

[0005] increased sensitivity and reduced absolute threshold of peripheral nociceptors

[0006] activation of so-called silent nociceptors

[0007] reorganisation of receptive fields

[0008] increased sensitivity in the spinal chord.

[0009] Said plastic changes have been described both for the primary afferences occurring in the ganglia and for the downstream neurones located in the spinal chord and are also suspected above the spine, e.g. in the thalamus. By analogy to the mechanisms described for learning and memory processes, it is to be assumed that a specific gene programme takes place in the cells involved comprising the coordinated regulation of relevant genes, the expression whereof then significantly contributes to the pathophysiological spread of chronic pain.

[0010] The point of departure of the invention was therefore the identification of such pain-regulated genes, the expression whereof changes in pain states and which are probably therefore involved in the emergence and processing of, in particular, chronic pain, by means of the connections in their regulation.

[0011] Regulation has already been demonstrated in various pain models for a number of known genes (see Table 1), as, for example, for neurotransmitters (substance P, CGRP), receptors (substance P receptors, μ, κ, δ opiate receptors, NMDA receptors) and transcription factors (cJun, JunB, cFos or Krox24). The fact that the above receptors are already used as molecular targets for the development of new analgesics (Dickenson, 1995), gives a clear indication that also the identification of new pain-regulated genes is of great interest for the development of analgesics, in particular for corresponding screening methods. The central idea in this context is to stop pain, in particular chronic pain, from arising or persisting, by influencing the function of those proteins the formation whereof is increased or decreased in pain states.

TABLE 1
Regulation of known genes/gene products in pain animal models

| | | | | |
|---|---|---|---|---|
| Gene (product) | Reg | Tissue/cell | Model | Literature |

(a) Neurotransmitters

| | | | |
|---|---|---|---|
| CGRP | SC-DH | UV irradiation of | Gillardon F et |
| | | the skin | al. (1992) Ann |
| | | | NY Acad |
| | | | Sci657: 493-96 |
| Preprotachykinin & | DRG | Monoarthritis | Donaldson L F |
| CGRP-mRNA | | | et al. (1992) |
| | | | Mol Brain Res |
| | | | 16: 143-49 |
| Preprotachykinin - | SC-DH | Formalin | Noguchi & |
| mRNA | | | Ruda (1992) J |
| | | | Neurosci 12: |
| | | | 2563-72 |
| Prodynorphin | SC | Exp arthritis | Höllt et al |
| mRNA | | | (1987) |
| | | | Neurosci Lett |
| | | | 96: 247-52 |
| Dynorphin Prot. | SC | Formalin | Ruda et al. |
| | | | (1988) |
| | | | PNAS 85: 622-26 |
| Substance P | Nociceptors | Exp. arthritis | Levine J D et al. |
| | | | (1984) |
| | | | Science 226: |
| | | | 547-49 |

(b) Neurotrophines

| | | | |
|---|---|---|---|
| BDNF mRNA & | DRG: trkA + cells | i. th. NGF Inj. | Michael G C et |
| immune reactivity | | | al. (1997) |
| | | | J Neurosci 17: |
| | | | 8476-90 |

(c) Receptors

| | | | |
|---|---|---|---|
| μ κ δ binding | SC-DH | monoarthritis | Besse D et al. |
| | | | (1992) |
| | | | Eur J |
| | | | Pharmacol 223: |
| | | | 123-31 |
| μ opiate receptors - | DRG | Carageenan ind. | Ji R-R et al. |
| immune reactivity | | inflammation | (1995) |
| | | | J Neurosci 15: |
| | | | 8156-66 |
| κ & δ opiate | DRG | Carageenan ind. | Ji R-R et al. |
| receptors —mRNA | | inflammation | (1995) |
| | | | J Neurosci 15: |
| | | | 8156-66 |
| κ & μ opiate | SC-DH | monoarthritis | Maekawa K et |
| receptors - mRNA | | | al. (1995) Pain |
| | | | 64: 365-71 |
| CCK_{B} receptors | DRG | Axotomy | Zhang X et al. |
| mRNA | | | (1993) |
| | | | Neuroscience |
| | | | 57: 227-233 |
| NMDA-R1-mRNA | SC-DH | CFA induced | Kus L et al. |
| | Laminae I & | inflammation | (1995) |
| | II | | Neuroscience |
| | | | 68: 159-65 |

(d) Enzymes

| | | | |
|---|---|---|---|
| NADPH diaphorase | SC-DH | Sciatic | Fiallos-Estrada |
| activity | | transection | et al. ('93) |
| | | | Neurosci Lett |
| | | | 150: 169-73 |
| NADPH diaphorase | SC | Formalin | Solodkin et al. |
| | | | 1992 |
| | | | Neurosci 51: |
| | | | 495-99 |
| NO synthetase | DRG | Axotomy | Verge V M K et |
| mRNA | | | al. (1992) |
| | | | PNAS 89: |
| | | | 11617-62 |
| NO synthetase | SC-DH | Formalin | Herdegen et al. |
| protein | | | (1994) |
| | | | Mol Brain Res |
| | | | 22: 245-58 |
| NO synthetase | DRG | Sciatic | Fiallos-Estrada |
| immune reactivity | | transection | et al. ('93) |
| | | | Neurosci Lett |
| | | | 150: 169-73 |

(e) Signal cascades

| | | | |
|---|---|---|---|
| rap1A, rap1B, H-ras | SC | Formalin | Urayama O et |
| mRNA | | | al. (1997) Mol |
| | | | Brain Res 45: |
| | | | 331-34 |
| PKC binding | SC-DH | CFA induced | Tölle T R et al |
| | | monoarthritis | (82) |
| | | | J Neurol 242 |
| | | | (S2): 135 |

(f) Transcription factors

| | | | |
|---|---|---|---|
| cFOS | SC | noxious | Hunt S P et al. |
| | | stimulation | (1987) |
| | | | Nature 328: |
| | | | 632-34 |
| cJun, JunB, cFOS | SC-DH | Formalin | Herdegen T et |
| Krox24 | | | al. (1994) Mol |
| | | | Brain Res 22: |
| | | | 245-48 |

SC, Spinal chord; DRG, dorsal root ganglia; CFA Complete Freund Adjunvans; NGF, Nerve Growth Factor

[0012] Hence the primary object of the invention was to develop a screening method for the identification of pain-relevant, in particular pain-regulating substances. The invention relates, therefore, to a method for discovering pain-regulating substances with the following process steps:

[0013] (a) incubation of a substance to be tested under appropriate conditions with a cell and/or a preparation from such a cell, which has synthesised a peptide or protein selected from the following group:

[0014] JNK3, PIM-2, LR-11, TFIIFβ, GGT-β, GATA3, CLC-7, catalase, tetraspanin (TM4SF/TSPAN-6/TM4-D), casein kinase 1a, MAP3K7/TAK-1 (TGF-β activated kinase), BAB14112 and/or spermidine synthase,

[0015] a peptide or protein which, or a part of which, is encoded by a polynucleotide according to any of FIGS. 34a), 34c), 34e), 34g), 35a), 35c), 35e), 36a), 36c), 37a), 37c), 38a), 38c), 39a), 39c), 39e), 40a), 40c), 40e), 41a), 41c), 41e), 42a), 42e), 43c), 43e), 44e), 45a), 45c), 45e), or 46e), or by a polynucleotide which is at least 90% similar thereto,

[0016] a peptide or protein having an amino acid sequence according to any of FIGS. 34b), 34d), 34f), 34h), 35b), 35d), 35f), 36b), 36d), 37b), 37d), 38b), 38d), 39b), 39d), 40b), 40d), 40f), 41b), 41d), 41f), 42b), 42f), 43d), 43f), 44f), 45b), 45d), 45f) or 46f), or a peptide or protein at least 90% similar thereto

[0017] and/or a protein which is encoded by a nucleic acid which, under stringent conditions, binds to a polynucleotide according to any of FIGS. 34a), 34c), 34e), 34g), 35a), 35c), 35e), 36a), 36c), 37a), 37c), 38a), 38c), 39a), 39c), 39e), 40a), 40c), 40e), 41a), 41c), 41e), 42a), 42e), 43c), 43e), 44e), 45a), 45c), 45e), or 46e), or to the antisense polynucleotide thereof,

[0018] a partial protein at least 10 amino acids long of any of the aforementioned proteins and/or peptides and/or

[0019] a peptide or protein encoded by a gene consisting of a polynucleotide, the nucleotide sequence whereof encompasses a gene fragment according to one of the sequences represented in FIGS. 1-33, or encoded by a polynucleotide at least 90% similar to such a gene,

[0020] (b) measurement of the binding of the test substance to the peptide or protein synthesised by the cell or measurement of at least one functional parameter altered by the binding of the test substance to the peptide or protein.

[0021] This novel screening method is based on being able to discover potential pain effectiveness of a substance by means of its interaction with a pain-regulated peptide or protein structure.

[0022] Here the term pain-regulating relates to a potential regulating influence on the physiological occurrence of pain, in particular to an analgesic effect. The term substance includes any compound suitable as an active ingredient in medicaments, in particular, therefore, low-molecular active ingredients, but also others such as nucleic acids, fats, sugars, peptides or proteins such as antibodies.

[0023] Incubation under appropriate conditions is understood here to mean that the substance to be examined can react with the cell or the corresponding preparation in an aqueous medium for a defined time before measurement. Here the aqueous medium can be at a temperature, for example, between 4° C. and 40° C., preferably at room temperature or at 37° C. The incubation time can be varied between a few seconds and a plurality of hours, depending on the interaction of the substance with the peptide or protein. Times between 1 min and 60 min are, however, preferred. The aqueous medium can contain appropriate salts and/or buffer systems, so that during incubation a pH of, for example between 6 and 8, preferably pH 7.0-7.5 prevails in the medium. Further appropriate substances such as coenzymes, nutrients etc. can be added to the medium. The appropriate conditions can be easily determined by a person skilled in the art on the basis of his experience, the literature or a few, simple preliminary experiments depending on the interaction to be examined of the substance with the peptide or protein, in order to obtain the clearest possible measurement in the method.

[0024] A cell which has synthesised a certain peptide or protein is a cell which has already endogenously expressed said peptide or protein or a cell which has been genetically altered so that it expresses said peptide or protein, and correspondingly contains said peptide or protein prior to the beginning of the method according to the invention. The cells can be cells either from immortalised cell lines or native cells originating from tissues and isolated therefrom, in which case the cells are no longer connected. The preparation from these cells encompasses, in particular, homogenates from the cells, the cytosol, a membrane fraction of the cells having membrane fragments, a suspension of isolated cell organelles etc.

[0025] In the scope of the present invention, the proteins and peptides listed here were identified as being regulated by pain by triggering pain in an animal and, after an appropriate time, comparing the expression pattern in certain tissues of the animal to those of a control animal in which pain had not been triggered. The differently expressed peptides and proteins found thereby also encompass known proteins such as JNK3, a protein kinase, PIM-2, a signalling kinase, LR-11, a mosaic protein from the family of low density lipoprotein receptors, TF11Fβ, a transcription factor, GGT-β, a subtype of geranylgeranyl transferase, GATA3, a transcription factor, CLC-7, a chloride channel, catalase, an enzyme of the oxygen detoxification pathway. In a further, more in depth analysis of the gene fragments discovered it has further been found that tetraspanin (TM4SF/TSPAN-6/TM4-D), which can be found specifically neuronally in the CNS, in particular inter alia in the cortex and hippocampus, and which is believed to play a role in the growth of neurites and the formation of synapses and to be a mediator between cell adhesion (integrins) and signal molecules (PKC, P14-Kinase), casein kinase 1a, which possibly contributes to the formation of synapses by means of phosphorylation of the AP-3 complex, MAP3K7/TAK-1 (TGF-β activated kinase), which specifically activates JNK kinases, BAB114112, a hitherto largely unknown protein, and spermidine synthase, responsible for growth, are also regulated by pain. For the functioning of the method it is not important from which species said proteins originate, but it is preferred if human, mouse or rat variants are used. The proteins named are known with regard to the DNA and amino acid coding sequence, and how they function in general has also been described. In the prior art, however they have not hitherto been linked to pain and in particular to the regulation of pain. Since here the identification of the proteins took place by means of a change in expression in an in-vivo pain model, the screening method according to the invention derived therefrom is significantly advantageous for future medicaments using said proteins, in that it builds not only on theoretical observations, but can also be presumed to possess strong in-vivo relevance. Since said method facilitates the interaction of substances with proteins and peptides not hitherto used in the field of pain as a criterion for the discovery of pain-regulating substances, it may now be possible, using said method, to discover pain-relevant substances which would have remained unnoticed in the methods known hitherto in the prior art using different peptides and proteins. This also is a significant advantage of the novel method according to the invention.

[0026] The proteins or peptides used can also be selected from those encoded by a polynucleotide according to one of FIGS. 34a), 34c), 34e), 34g), 35a), 35c), 35e), 36a), 36c), 37a), 37c), 38a), 38c), 39a), 39c), 39e), 40a), 40c), 40e), 41a), 41c), 41e), 42a), 42e), 43c), 43e), 44e), 45a), 45c), 45e), or 46e). Shown are most of the known mouse, rat and human cDNA coding sequences of JNK3, PIM-2, LR-11, TFIIFβ, GGT-β, GATA3, CLC-7 and catalase,as well as tetraspanin (TM4SF/TSPAN-6/TM4-D), casein kinase 1a, MAP3K7/TAK-1 (TGF-β activated kinase), BAB14112 and/or spermidine synthase, and in the case of rat GATA3 only a partial sequence and in the case of CCL-7, mouse genomic DNA is shown. Hitherto unknown in the prior art is the cDNA sequence of PIM-2, rat, which was cloned in the scope of the present invention. For the method according to the invention also peptides and proteins encoded by only one segment (part) of the polynucleotide can be used, although at least one polypeptide (>10 amino acids) or one protein must be used. Finally, under certain circumstances, also only partial segments of one of the aforenamed proteins of at least 10 amino acids are necessary for a screening method. Peptides and proteins encoded by a DNA sequence at least 90% similar to one of those shown can also be used, since such minor deviations usually do not influence the interaction with peptide and protein and therefore do not influence the functioning of the method. By 90% similarity a 90% correspondence in the sequence of bases in the coding region of the polynucleotide is understood.

[0027] The proteins can also be selected from those having an amino acid sequence according to any of FIGS. 34b), 34d), 34f), 34h), 35b), 35d), 35f), 36b), 36d), 37b), 37d), 38b), 38d), 39b), 39d), 40b), 40d), 40f), 41b), 41d), 41f), 42b), 42f), 43d), 43f), 44f), 45b), 45d), 45f) or 46f). These also are predominantly sequences known in the prior art, except for the sequence of PIM-2 rat, which was obtained in the scope of the present invention. Peptides and proteins having an amino acid sequence at least 90% similar to one of those shown can be used here, since minor deviations in the amino acid sequence also do not usually influence the interaction of the substance with peptide and protein and thus do not influence the functioning of the method. By 90% similarity a 90% correspondence in the sequence of amino acids is understood.

[0028] The proteins can also be selected from those encoded by a nucleic acid which, under stringent conditions, bind to a polynucleotide according to any of FIGS. 34a), 34c), 34e), 34g), 35a), 35c), 35e), 36a), 36c), 37a), 37c), 38a), 38c), 39a), 39c), 40a), 40c), 40e), 41a), 41c), 41e), 42a), 42e), 43c), 43e), 44e), 45a), 45c), 45e) or 46e) or to the antisense polynucleotide thereof Stringent conditions are understood here to mean conditions under which only perfectly base-paired nucleic acid strands are formed and remain stable, and antisense polynucleotide is understood to mean a molecule consisting of a plurality of natural or modified nucleic acids, the base sequence of which is complementary to the base sequence of a partial region of an RNA occurring in nature.

[0029] It may, in principle, be sufficient for the method according to the invention to use a partial protein at least 10 amino acids long of one of the aforementioned proteins and/or peptides, since 10 amino acids, preferably 15, in particular 20 amino acids are or can be fully specific.

[0030] The peptides and proteins can, however, also be selected from such compounds, encoded by a gene consisting of a polynucleotide, the nucleotide sequence of which encompasses a gene fragment according to any of the sequences represented in FIGS. 1-33. In the scope of the present invention pain-regulated gene fragments which have not been assigned to any known peptide or protein in the prior art were identified and sequenced. A postanalysis of the gene fragment, however, allowed assignment in some cases to tetraspanin (TM4SF/TSPAN-6/TM4-D), casein kinase 1a, MAP3K7/TAK-1 (TGF-β activated kinase), BAB14112 and/or spermidine synthase. In each case the sufficiently complete sequenced gene fragment clearly defines the relevant gene or polynucleotide, the sequence of which the gene fragment is a part. Because the corresponding gene fragment has been identified as pain-regulated a clearly physiological function of the gene is outlined. The person skilled in the art can attain the complete gene which encompasses the fragment using known methods. Thus a polynucleotide according to any of FIGS. 1-33 can be labelled as a probe, a cDNA bank can be hybridised with the probe and washed under stringent conditions and the cDNA clone to which the probe has bound can be isolated and, optionally, sequenced. Thus, the gene or polynucleotide can be obtained by obtaining and synthesising segments of a polynucleotide according to any of FIGS. 1-33 as gene-specific oligonucleotide primers, with which the extended polynucleotide is then generated and optionally sequenced by means of PCR, using single or double-stranded DNA, cDNA libraries or genomic DNA as a template. The procedure is explained more precisely later with an example. For this group of peptides and proteins also the advantage over the known method applies in that, when used in the method according to the invention, in-vivo relevance is assured and the method allows potentially pain-regulating substances to be identified, which in the screening methods hitherto known in the prior art might possibly have remained unnoticed.

[0031] The criterion by which the method allows the discovery of interesting substances is either the binding to the protein or peptide, which, e.g., can be shown by suppression of a known ligand or the amount of bound substance, or the alteration of a functional parameter by means of the interaction of the substance with the peptide or protein. Said interaction can, in particular, consist of regulation, inhibition and/or activation of receptors, ion channels and/or enzymes, and changed functional parameters can, for example, be the gene expression, the ion concentration, the pH or the membrane potential and the change in enzyme activity or concentration of the 2^{nd} messenger.

[0032] For explanation of the invention, as well as the explanations for terms in the main body of the text, further definitions are given below in order to clarify how certain terms, in particular those used in the claims, are to be understood and interpreted in the context of the present invention.

[0033] substance: a chemical compound is meant by this. Here compounds in the narrower sense are meant which can potentially bring about an effect in the body, low-molecular active ingredients, nucleic acids, fats, sugars, peptides or proteins, in particular here low-molecular active ingredients.

[0034] pain-regulating: in the context of the invention pain-regulating means that the substance directly or indirectly influences the perception of pain, in particular, of course, having an analgesic effect.

[0035] incubation: by incubation the introduction and leaving of a biological object of investigation is to be understood, for example a cell or a protein, at a certain temperature in a medium such as in an incubator or on a water-bath. Under appropriate conditions means here incubation under physiological conditions (e.g. 37° C. pH 7.2) or under the conditions which make optimal measurement possible in the method.

[0036] cell: the cell is a self-regulating, open system in flow equilibrium with its surroundings by means of permanent exchange of substances, having its own metabolism and ability to reproduce. The cell can be cultured separately or be part of a tissue, in particular of an organ, and may be present there either individually or also in association with other cells.

[0037] preparation from a cell: by this preparations are understood, which can be produced by means of chemical, biological, mechanical or physical methods by changing the cell structure, for example membrane fragments, isolated cell compartments, isolated cytosol, or homogenate obtained from tissue.

[0038] peptide: compound of amino acids linked in chains by peptide bonds. An oligopeptide consists of between 2 and 9 amino acids, a polypeptide consists of between 10 and 100 amino acids.

[0039] protein: compound of more than 100 amino acids linked in chains by peptide bonds, possibly having a defined spacial structure.

[0040] JNK3: protein kinase from the family of mitogen-activated protein kinases.

[0041] PIM-2: a proto-oncogene and a serine threonine kinase.

[0042] LR-11: a member of the LDL (low density lipoprotein) receptor family and a mosaic protein.

[0043] TFIIFβ: beta subunit of a transcription initiation factor, which binds to the RNA polymerase II.

[0044] GGT-β: beta subunit of geranyl geranyl transferase type 1 (EC 2.5.1.3.).

[0045] GATA3: type 3 of a GATA binding protein.

[0046] CLC-7: a chloride channel protein

[0047] catalase: an enzyme (EC 1.11.1.6) which plays a crucial role in the detoxification of reactive oxygen species.

[0048] tetraspanin (TM4SF/TSPAN-6/TM4-D): specifically found neuronally in the CNS, in particular inter alia in the cortex and the hippocampus. Probably plays a role in the growth of neurites and formation of synapses and seems to be a mediator between cell adhesion (integrins) and signal molecules (PKC, P14-kinase)

[0049] casein kinase 1a: ubiquitous enzyme, which possibly contributes to the formation of synapses by means of phosphorylation of the AP-3 complex.

[0050] MAP3K7/TAK-1 (TGF-β activated kinase): enzyme which specifically activates JNK kinases.

[0051] BAB14112: a hitherto largely unknown protein; AN: BAB14112,

[0052] spermidine synthase: ubiquitous enzyme, which seems to be responsible inter alia for cell growth.

[0053] polynucleotide: the basic nucleotide is a component of nucleic acids fundamentally consisting of nucleic base, pentose and phosphoric acid. Said nucleotide corresponds to a high-molecular polynucleotide of a plurality of nucleotides linked with one another via phosphoric acid pentose esterification. The present invention, however, also includes modified polynucleotides, which retain the base sequence, but possess a modified backbone instead of the phosphoric acid pentose.

[0054] at least 90 (95, 97)% similar: by this it is understood that the polynucleotides denoted are at least 90% (95%, 97%) identical to the reference (figure etc.) with regard to the base sequence in their coding region, the peptides and proteins denoted are at least 90% (95%, 97%) identical in their primary structure, and the amino acid sequences at least 90% (95%, 97%) identical to the reference.

[0055] gene: by the term gene a genome segment with a defined nucleotide sequence is referred to, which contains the information for synthesis of an mRNA, pre-mRNA or another RNA (e.g. tRNA, rRNA, snRNA etc.) It consists of coding and non-coding segments.

[0056] gene fragment: nucleic acid segment, which contains a part of a gene in its base sequence.

[0057] physiologically extended gene fragment: a gene fragment which is extended by means of molecular biological methods, such as e.g. the screening of a cDNA library, the extraction of complementary DNA strands from a nucleic acid mixture or methods using PCR (so-called RACE protocols) in such a way that it corresponds in its sequence to the mRNA expressed in the corresponding target organ (brain, spinal cord, dorsal root ganglion).

[0058] binding to the peptide or protein: interaction between substance and peptide or protein, which leads to fixation.

[0059] functional parameters: by this units of measurement of an experiment are meant, which correlate with the function of a protein (ion channel, receptor, enzyme).

[0060] genetically manipulated: manipulation of cells, tissues or organisms in such a way that genetic material is introduced.

[0061] endogenously expressed: expression of a protein, which, under appropriate culture conditions, shows a cell line without expression of said corresponding protein being induced by genetic manipulation

[0062] G protein: usual international abbreviation for a guanoseintriphosphate (GTP) binding protein which is activated as a signal protein by G protein coupled receptors.

[0063] reporter gene: general term for genes, the gene products whereof can be identified by means of simple biochemical methods or histochemical methods, such as, for example, luciferase, alkaline phosphatase or green fluorescent protein (GFP).

[0064] (recombinant) DNA construct: general term for any type of DNA molecules, which have originated by in vitro linking of DNA molecules.

[0065] cloning vector: general term for nucleic acid molecules, which, in cloning, serve as carriers of foreign genes or parts of said genes.

[0066] expression vector: term for specially constructed cloning vectors, which, after being introduced into an appropriate host cell, allow transcription and translation of the foreign gene cloned into the vector.

[0067] LTR sequence: abbreviation for long terminal repeat. General term for long sequence regions found at both ends of a linear genome. Such sequence regions occur, for example, in the genomes of retroviruses and at the ends of eukaryotic transposons.

[0068] poly A tail: the adenyl residues (ca.20-250) attached by polyadenylation at the 3′ end of messenger RNAs.

[0069] promoter sequence: term for a DNA sequence region from which the transcription of a gene i.e. the synthesis of mRNA is controlled.

[0070] ORI sequence: Abbreviation for origin of replication. The ORI sequence allows a DNA molecule to reproduce as an autonomous unit in the cell.

[0071] enhancer sequence: term for relatively short genetic elements, partly appearing as repetitions, which usually strengthen the expression of some genes to a variable extent.

[0072] transcription factor: term for a protein which influences the transciption of a gene by means of binding to specific DNA sequences.

[0073] culture: to keep cells or tissues under appropriate culture conditions.

[0074] conditions which allow expression: by this is understood the selection and use of culture conditions which allow expression of the protein in question, including temperature change, change of medium, addition of inducing substances, and leaving out of inhibiting substances,

[0075] incubation time: length of time for which cells or tissues are incubated, i.e. exposed to a defined temperature.

[0076] selection pressure: use of culture conditions which enhance growth in cells using a certain gene product known as the selection marker.

[0077] amphibian cell: cell from an animal belonging to the class amphibia.

[0078] bacteria cell: cell which is classified under the broad order of eubacteria or archaebacteria, or derives therefrom.

[0079] yeast cell: cell which is classified under the order of endomycetales, or derives therefrom.

[0080] insect cell: cell which is allocated to the class Hexapoda, or derives therefrom.

[0081] native mammal cell: cell originating from a mammal corresponding in its relevant characteristics to the cell found in the organism.

[0082] immortalised mammal cell: cell which, as a result of the culture conditions used or genetic manipulation, has acquired the characteristic of dividing more frequently than is usual (ca. 100) in the culture.

[0083] labelled: rendered accessible for a positive reaction by means of appropriate modification or derivatisation. For example by radioactivity, fluorescence or luminescence.

[0084] ligand: substance which binds to a molecule found in the body or in a cell, in particular a receptor.

[0085] suppression: complete or partial removal of a ligand from its binding point.

[0086] bound activity: biochemically or physically determined measurement which correlates to the amount of ligands bound to a receptor.

[0087] regulation: the inhibition or activation of a process resulting as part of a regulation process

[0088] inhibition: the prevention/lessening of a process as a special case in regulation

[0089] activation: the increasing of a process as a special case in regulation

[0090] receptors: in the broadest sense, all molecules present in the prokaryote or eukaryote organism which can bind to an active substance. In the narrower sense, membrane-bound proteins or complexes of a plurality of proteins, which bring about an alteration in the cell through binding of an active substance.

[0091] ion channels: membrane-bound proteins or complexes of a plurality of proteins via which cations or anions can penetrate the membrane.

[0092] enzymes: term for proteins or complexes of an activating non-protein component with a protein which possesses catalytic properties.

[0093] gene expression (express/expressible): the translation of the genetic information of a gene into RNA (RNA expression) or into protein (protein expression).

[0094] ion concentration: ion concentration of one or more ions in a particular compartment.

[0095] membrane potential: tension difference over a membrane because of a surplus of cations on the one side and anions on the other side of the membrane.

[0096] Change in enzyme activity: inhibition or induction of the catalytic activity of an enzyme.

[0097] 2nd messenger: small molecule, which is formed in response to an extra cellular signal either in the cytosol, or which migrates into the cytosol and thus helps to pass on the information to the cell line, such as, for example, cAMP, IP₃.

[0098] (gene) probe: term for any type of nucleic acid, with the aid of which a gene which is sought or a certain DNA sequence can be detected. By means of derivatisation of the gene probe (e.g. biotin, magnetic beads, digoxin) DNA molecules can, additionally, be extracted from a mixture. Cloned genes, gene fragments, chemically synthesised oligonucleotides and also RNA, which is usually radioactively labelled, are used as probes

[0099] DNA: international term for deoxyribonucleic acid

[0100] genomic DNA: general term for the DNA originating from the nucleus of a cell in eukaryotic organisms.

[0101] cDNA: abbreviation for complementary DNA. Term for the single or double stranded DNA copy of an RNA molecule.

[0102] cDNA bank/library: term for a collection of arbitrarily cloned cDNA fragments, which, taken together, represent the entire RNA synthesised by a cell or a tissue.

[0103] cDNA clone: term for a population of genetically identical cells, which are derived from a single cell such that said cell contains an artificially introduced cDNA fragment.

[0104] hybridisation: formation, by means of base pairing, of a double-stranded nucleic acid molecule from two separate single strands.

[0105] a stringent conditions: conditions under which only perfectly base-paired nucleic acid strands are formed and remain stable.

[0106] isolate: to detect and separate a desired molecule from a mixture.

[0107] DNA sequencing: determination of the sequence of bases in a DNA molecule.

[0108] nucleic acid sequence: term for the primary structure of a DNA molecule, i.e. the sequence of the individual bases from which DNA is composed.

[0109] gene-specific oligonucleotide primers: oligonucleic acids, i.e. nucleic acid fragments 10-40 bases long, which, in their base composition, allow stringent hybridisation to the desired gene or the desired cDNA

[0110] determination of oligonucleotide primers: the manual or computer-aided search for oligonucleotides belonging to a given DNA sequence which are optimally suited for a hybridisation and/or a polymerase chain reaction.

[0111] PCR: abbreviation for polymerase chain reaction. In vitro method for selective enrichment of nucleic acid regions of defined length and defined sequence from a mixture of nucleic acid molecules.

[0112] DNA template: nucleic acid molecule or a mixture of nucleic acid molecules from which a DNA segment is amplified using PCR (see above).

[0113] RNA: usual international abbreviation for ribonucleic acids.

[0114] mRNA: usual international abbreviation for messenger ribonucleic acids involved in the transfer of genetic information from the nucleus into the cell and which contain information for the synthesis of a polypeptide or a protein.

[0115] antisense polynucleotide: a molecule, consisting of a plurality of natural or modified nucleic acids, whose base sequence is complementary to the base sequence of a partial region of an RNA occuring in nature.

[0116] PNA: usual international abbreviation for peptidic nucleic acids. Here amino acids linked by peptide bonds form a chain and the amino acids carry a base, capable of hybridising with DNA or RNA, as a side chain.

[0117] sequence: sequence of nucleotides or amino acids. In the specific context of the present invention the nucleic acid sequence is meant.

[0118] ribozyme: term for an RNA with catalytic capacity (e.g. ligase, endonuclease, polymerase, exonuclease).

[0119] DNA enzyme: term for a DNA molecule containing catalytic activity (e.g. ligase, endonuclease, polymerase, exonuclease).

[0120] catalytic RNA/DNA: general term for ribozymes and DNA enzymes (see above).

[0121] adenovirus: cytopathogenic virus occurring in vertebrates.

[0122] adeno-associated virus (AAV): belongs to the parvovirus family. For effective multiplication of AAV a coinfection of the host cells with auxiliary viruses (e. g. herpes, vaccinia or adenoviruses) is needed. The characteristic of AAV of stable integration into the host genome makes it particularly interesting as a transduction vector for mammalian cells.

[0123] herpes virus: viral cause of herpes infection.

[0124] post-translational modification: alteration in proteins or polypeptides carried out after translation, including, e.g phosphorylation, glycosylation, amidation, acetylation or proteolysis.

[0125] glycosylate: term for attaching single sugar molecules or whole chains of sugars to proteins.

[0126] phosphorylate: term for attaching one or more phosphate residues to a protein, preferably to the OH groups of amino acids serine, threonine or tyrosine.

[0127] amidate: term for the transformation of a carboxyl function into an amide function, e.g. to the carboxyterminal amino acid residue of a peptide or protein.

[0128] provide with a membrane anchor: modification, after translation, of a protein or other organic molecule in such a way that it is anchored by attaching a hydrophobic molecule, appropriately a fatty acid or derivative thereof, to the double layer lipid membrane of cells.

[0129] cleave: in the current specific case, the cleavage of a peptide or protein into a plurality of subsequences.

[0130] reduce: to reduce a molecule consisting of a plurality of individual parts by one or more parts.

[0131] antibodies: proteins called immunoglobins which are either soluble or bound to cell membranes having a specific combining site for antigens.

[0132] monoclonal antibodies: antibodies having extremely high selectivity for a single antigenic determinant of an antigen.

[0133] polyclonal antibodies: mixture of antibodies for a plurality of determinants of an antigen.

[0134] transgenic: genetically altered

[0135] non-human mammal: any mammal (Mammalia class) with the exception of the human species.

[0136] germ cell: cell having a haploid genome, which by means of fusion with a second germ cell makes the formation of a new organism possible.

[0137] somatic cell: diploid cell as component of an organism.

[0138] introduction of one or more chromosomes: intervention in the nucleotide sequence on a chromosomatic level.

[0139] genome: general term for the totality of all genes in an organism.

[0140] ancestor of the animal: an animal (the ancestor), which is directly related by natural or artificial means to another animal (the descendant) by transmission of its genetic material.

[0141] expressible: a nucleic acid molecule is expressible if it contains information for synthesis of a protein or polypeptide and is equipped with appropriate regulatory sequences allowing synthesis of said protein or polypeptide either in vitro or in vivo. If these prerequisites are no longer fulfilled, for example on account of intervention in the coding sequence, the nucleic acid molecule is no longer expressible.

[0142] rodent: animal of the order Rodentia, e.g. rat or mouse.

[0143] substance identifiable as pain-regulating: substance which, when introduced into a living organism, brings about a change in behaviour described by the person skilled in the art as pain-inhibiting (anti-nociceptive, anti-hyperalgesic or anti-allodynic). In the case of the screening process, this means that during the screening the substance clearly exceeds, for example by 100%, the binding or interaction of the average of the tested substances by stronger binding or producing a change in a functional parameter.

[0144] compound: another name for molecule, consisting of a plurality of atoms, here a molecule identified by the method according to the invention.

[0145] active ingredient: a compound which, when used on an organism, brings about a change in said organism. In particular, organic-chemically synthesised molecules are meant, which exert a healing effect on the organism. Here, in particular, molecules which bind to the proteins and peptides according to the invention.

[0146] low-molecular: molecule with a molecular weight <2 kDa.

[0147] medicament: a substance according to the definition in article 1 §2 of the law concerning the trade in medicaments.

[0148] diagnostic reagent: compound or method which can be used in order to diagnose an illness.

[0149] treatment of pain: method with the aim of reducing or relieving pain, or inhibiting the expected emergence of pain (pre-emptive analgesia).

[0150] chronic pain: a long-lasting sensation of pain, often characterised in that it persists beyond the time and place of the initial stimulus and the pain sensitivity of the body increases.

[0151] gene therapy: by gene therapy all methods are understood which are aimed at treating the cause of genetic illnesses by means of appropriate changes in the genome.

[0152] in vivo gene therapy: introduction of genetic material into the living organism for the purpose of gene therapy. Intervention via somatic and germ cells differs in that the one is carried out on diploid cells and the other on haploid cells.

[0153] in vitro gene therapy: introduction of genetic material into cells outside the human body with the aim of using said cells again later by introducing them into the human body for the purpose of gene therapy.

[0154] diagnosis: method for identifying an illness.

[0155] study of effectiveness: study with the aim of investigating the effectiveness of a compound for its influence on a living organism.

[0156] In a preferred embodiment of the method the cell is genetically manipulated before step (a). Here genetic material is introduced into the cell, in particular one or more polynucleotide sequences. In a farther preferred variation of said embodiment genetic manipulation allows the measurement of at least one of the functional parameters changed by the test substance. In said embodiment conditions are created by means of genetic manipulation under which the alteration of a functional parameter can be measured, or under which the alteration can be better measured. It is especially preferred if a form of a G-Protein not endogenously expressed in the cell is expressed by the genetic manipulation, or if a reporter gene is introduced. Here, in particular, the genetic introduction into the cell of a G protein not endogenically available or not physiologically expressed (a GTP binding protein) is meant, for example, the introduction of a chimeric G protein which allows a change in the signal path or of a promiscuous G protein which binds very easily. The introduction of a reporter gene, on the other hand, allows measurement of induced expression of the gene product (i.e. expression triggered outside the cell).

[0157] In a further preferred embodiment the cell is genetically manipulated in such a way that the cell contains at least one polynucleotide according to any of FIGS. 34a), 34c), 34e), 34g), 35a), 35c), 35e), 36a), 36c), 37a), 37c), 38a), 38c), 39a), 39c), 39e), 40a), 40c), 40e), 41a), 41c), 41e), 42a), 42e), 43c), 43e), 44e), 45a), 45c) 45e), or 46e) or a polynucleotide at least 90% similar or a polynucleotide of the coding sequence of a gene which contains a gene fragment according to any of the sequences represented in FIGS. 1-33, or a polynucleotide at least 90% similar thereto. Thus it is possible, for example, for a peptide or protein which is not endogenously expressed in the cell or preparation used in the method to be synthesised by the cell. Here it is particularly preferred if the polynucleotide is contained in a recombinant DNA construct. By a (recombinant) DNA construct a DNA molecule produced in vitro is understood.

[0158] If, in the method, the cell is genetically manipulated before step (a), it us preferred that, after the genetic manipulation and before step (a), the cell is cultivated under conditions which allow expression, optionally under selection pressure. Cultivation is understood as the keeping of cells or tissues under conditions which ensure survival of the cells and their succeeding generations. Here the conditions should be selected in such a way as to allow expression of the material added by the genetic manipulation. For this purpose pH, oxygen content and temperature should be physiologically maintained and sufficient nutrients and necessary cofactors should be added. Selection pressure allows only the cells in which the genetic manipulation has been at least partly successful to be further cultivated. This includes, for example, the introduction of antibiotic resistance via the DNA construct.

[0159] In the method according to the invention it is particularly preferred if the cell used is an amphibian cell, a bacteria cell, a yeast cell, an insect cell or an immortalised or native mammalian cell. Examples of amphibian cells are Xenopus oocytes, examples of bacteria cells are E.coli cells, examples of yeast cells Saccharomyces cerevisiae, examples of insect cells Sf9 cells, examples of immortalised mammalian cells HeLa cells und examples of native mammalian cells are CHO (Chinese Hamster Ovary) cells

[0160] In a preferred measuring method for determining the binding of the substance to peptide or protein in the method according to the invention the measurement of the binding takes place by means of suppression a known labelled ligand of the peptide or protein and/or by means of the activity bound thereto of a labelled test substance. Here a ligand is a molecule binding highly specifically to the protein or peptide, which is suppressed from the attachment site by another binding substance to be tested. Labelling is understood as meaning an artificial modification in the molecule which allows it to be traced. Examples are radioactive, fluorescent or luminescent labelling.

[0161] In a further preferred measuring method to determine the change in the functional parameters triggered by the binding of the substance to peptide or protein in the method according to the invention, measurement of at least one of the functional parameters changed by the test substance takes places by means of measurement of the regulation, inhibition and/or activation of receptors, ion channels and/or enzymes, in particular by means of measurement of the change in gene expression, the ion concentration, the pH or the membrane potential, via change in the enzyme activity or the concentration of the 2nd messenger. Thus on the one hand the measurement of the effectiveness of the substance over the influence of receptors, ion channels, and/or enzymes is directly included and on the other hand examples preferably to be measured are changing parameters such as gene expression, ion milieu, pH, membrane potential, enzyme activity or concentration of the 2^{nd} messenger. By ion milieu in particular the concentration of one or more ions in a cell compartment is understood, in particular the cytosol. By membrane potential the loading difference between two sides of a biomembrane is understood and by 2^{nd} messenger the messenger material of the intracellular signal path such as e.g. cyclic AMP (cAMP), inosotoltriphosphate(IP3) or diacylglycerol (DAG)

[0162] In a preferred variation of the method the peptide or protein in steps (a) and (b) is selected from the following groups:

[0163] JNK3, PIM-2, LR-11, TFIIFβ, GGT-β, GATA3, CLC-7, catalase, tetraspanin (TM4SF/TSPAN-6/TM4-D), casein kinase 1a, MAP3K7/TAK-1 (TGF-β activated kinase), BAB14112 and/or spermidine synthase,

[0164] a peptide or protein which, or part of which, is encoded by a polynucleotide according to any of FIGS. 34a), 34c), 34e), 34g), 35a), 35c), 35e), 36a), 36c), 37a), 37c), 38a), 38c), 39a), 39c), 39e), 40a), 40c), 40e), 41a), 41c), 41e), 42a), 42e), 43c), 43e), 44e), 45a), 45c), 45e), or 46e), or by a polynucleotide which is at least 90% preferably 95%, in particular 97% similar thereto, or

[0165] a peptide or protein having an amino acid sequence according to any of FIGS. 34b), 34d), 34f), 34h), 35b), 35d), 35f), 36b), 36d), 37b), 37d), 38b), 38d), 39b), 39d), 40b), 40d), 40f), 41b), 41d), 41f), 42b), 42f), 43d), 43f), 44f), 45b), 45d), 45f) or 46f) or a peptide or protein at least 90%, preferably 95%, in particular 97% similar thereto

[0166] and/or a protein, which is encoded by a nucleic acid which, under stringent conditions, binds to a polynucleotide according to any of FIGS. 34a), 34c), 34e), 34g), 35a), 35c), 35e), 36a), 36c), 37a), 37c), 38a), 38c), 39a), 39c), 39e), 40a), 40c), 40e), 41a), 41c), 41e), 42a), 42e), 43c), 43e), 44e), 45a), 45c), 45e), or 46e) or to the antisense polynucleotide thereof and/or

[0167] a partial protein at least 10 preferably 15, in particular at least 20 amino acids long, of any of the aforementioned proteins and/or peptides.

[0168] Included here is the use of peptides and in particular proteins having a known sequence and function, but where no function relating to pain was known in the prior art for said peptides and proteins.

[0169] In a further preferred variation of the method the peptide or protein in steps (a) and (b) is encoded by a gene consisting of a polynucleotide containing a gene fragment according to any of the sequences represented in FIGS. 1, 3-8, 10, 11, 13, 14, 15, 17-27 or 31-33, or a polynucleotide at least 90%, in particular 95%, preferably 97% similar thereto.

[0170] In a further preferred variation of the method the peptide or protein in steps (a) and (b) is encoded by a gene consisting of a polynucleotide containing a gene fragment according to any of the sequences represented in FIGS. 2, 9, 12, 16 or 28-30, or a polynucleotide at least 90%, in particular 95%, preferably 97% similar thereto.

[0171] Preferably the invention further relates to a polynucleotide corresponding by at least 90%, preferably 95%, in particular at least 97% to any of the nuclear acid sequences represented in any of FIGS. 1-33 or to a polynucleotide from the coding sequence of a gene containing a gene fragment according to any of FIGS. 1-33: Even the gene fragments represented are included here, as is a polynucleotide corresponding either completely or at least to parts of the coding sequence of the gene corresponding to the fragment. Thus also polynucleotides which show at least 90%, preferably 95%, in particular 97% similarity in their base sequence to the coding sequence of the polynucleotides represented or the coding sequence of the gene are meant.

[0172] The first particularly favoured form of the polynucleotide is a polynucleotide corresponding by at least 90%, preferably 95%, in particular at least 97% to any of the nucleotide sequences represented in any of FIGS. 1, 3-8, 10, 11, 13, 14, 15, 17-27 or 31-33, in particular 20 or 21 or to parts thereof, or to a polynucleotide from the coding sequence of a gene containing a gene fragment according to any of FIGS. 1, 3-8, 10, 11, 13, 14, 15, 17-27 oder 31-33, in particular 20 or 21.

[0173] Preferably the invention further relates to a first polynucleotide defined by the current production method, namely a polynucleotide corresponding by at least 90%, preferably 95%, in particular by at least 97% to a defined nuclear acid sequence obtainable by labelling a polynucleotide according to any of FIGS. 1-33 as a probe, hybridising a cDNA bank with the probe and washing under stringent conditions and isolating and optionally sequencing the cDNA clone to which the probe has bound. Here a polynucleotide or gene, defined by the production method by which a certain product, the gene containing a certain known gene fragment, is isolated and can be sequenced. A probe is a nucleic acid which can be used for the identification of complementary or corresponding nucleotide sequences and which is usually labelled so that it can be identified. A cDNA bank is made up of cloned cDNA fragments of a cell or a tissue which should reproduce the mRNA of the chosen tissue as completely as possible. Hybridisation means the binding of two single-stranded nucleic acid molecules and washing under stringent conditions is designed to ensure that only nucleic acid molecules hybridised by exactly paired bases remain bound. A cDNA clone is a genetically identical group of descendants, here having identical cDNA.

[0174] Preferably the invention further relates to a second polynucleotide defined by the production method, corresponding by at least 90%, preferably 95%, in particular by at least 97% to a defined nuclear acid sequence obtainable by determining and synthesising segments of a polynucleotide according to any of FIGS. 1-33 as gene-specific oligonucleotide primers, with which the extended polynucleotide is then generated and, optionally, sequenced by means of PCR using single or double-stranded DNA from cDNA libraries or genomic DNA as a template. Here also a polynucleotide or gene is defined by means of a further production process by which a certain product, the gene containing a certain known gene fragment, is isolated and can be sequenced. Primer is an oligonucleotide, which hybridises with the target DNA (as a so-called template) and is the point of departure for the synthesis. PCR is the abbreviation for polymerase chain reaction, in which the heat resistance of a certain polymerase is used for selective amplification. Here the template serves as starting material on which the amplification takes place selectively with the primers of suitable hybridising DNA.

[0175] The second particularly favoured form of the polynucleotide is the form defined by the production method, in particular when a polynucleotide (gene fragment) according to any of FIGS. 1, 3-8, 10, 11, 13, 14, 15, 17-27 or 31-33, in particular 20 or 21, is used as the point of departure for production/isolation/sequencing.

[0176] It is further preferred if the polynucleotide is an RNA or single or double-stranded DNA, in particular mRNA or cDNA.

[0177] It is likewise preferred if the polynucleotide is an antisense polynucleotide or PNA showing a sequence capable of binding specifically to a polynucleotide according to the invention. By PNA, peptidic nucleic acid is understood, which carries the base pairs, but whose backbone is peptidically bound. An antisense polynucleotide shows the complementary base sequence to at least one part of a base nucleic acid. It is likewise preferred if the polynucleotide is part of a ribozyme or other DNA enzyme or of a catalytic RNA or DNA. By ribozyme a catalytically active ribonucleic acid is understood, by DNA enzyme a corresponding deoxyribonucleic acid, that is catalytic RNA or DNA.

[0178] The invention further relates to a vector containing any of the polynucleotides already described. By vector a nucleic acid molecule is understood which, in genetic manipulation, serves to contain or transmit foreign genes. It is especially preferred if it is an expression vector. It then promotes expression of the foreign gene or polynucleotide contained.

[0179] Further preferred is a vector derived from a virus, for example the adeno virus, adeno-associated virus or herpes virus and/or that it contains at least one LTR, poly A, promotor and/or ORI sequence. An LTR is a long terminal repeat, a segment found at the end, for example in viruses. A poly A sequence is a tail more than 20 adenosine residues long. A promotor sequence is the region which controls transcription.

[0180] A particularly favoured form of the vector according to the invention is a vector containing a polynucleotide or a polynucleotide at least 90%, preferably 95%, in particular 97% similar thereto, according to FIGS. 1, 3-8, 10, 11, 13, 14, 15, 17-27 or 31-33, in particular 20 or 21 or a polynucleotide or a polynucleotide at least 90%, preferably 95%, I particular 97% similar thereto containing the sequence according to FIGS. 1, 3, 8, 10, 11, 13, 14, 15, 17-27 or 31-33, in particular 20 or 21, or a polynucleotide or a polynucleotide at least 90%, preferably 95%, in particular 97% similar thereto, obtained by means of a production method using a gene fragment according to any of FIGS. 1, 3-8, 10, 11, 13, 14, 15, 17-27 or 31-33, in particular 20 or 21.

[0181] The invention further relates to a peptide, in particular an oligopeptide or polypeptide, or a protein encoded by any of the polynucleotides already described as subjects of the invention.

[0182] The invention further relates to a peptide, in particular an oligopeptide or polypeptide or a protein encoded by a polynucleotide which, under stringent conditions, hybridises with any of the polynucleotides according to FIGS. 1-33 or with any of the antisense polynucleotides thereof.

[0183] The invention also relates to whether the peptide or protein has been modified after translation, in particular by glycosylation, phosphorylation, amidation, methylation, acetylation, ADP ribosylisation, hydroxylation, being provided with a membrane anchor, cleaved or reduced. Modifications after translation can, for example, be taken from Voet/Voet, Biochemistry, 1st Edition, 1990 pp 935-938.

[0184] A particularly favoured form of the peptide or protein is obtained if it is encoded by a polynucleotide or a polynucleotide at least 90%, preferably 95%, in particular 97% similar thereto according to FIGS. 1, 3-8, 10, 11, 13, 14, 15, 17-27 or 31-33, in particular 20 or 21, or by a polynucleotide or encoded by a polynucleotide at least 90%, preferably 95%, in particular 97% similar thereto containing the sequence according to FIGS. 1, 3-8, 10, 11, 13, 14, 15, 17-27 or 31-33, in particular 20 or 21, or a polynucleotide, or a polynucleotide at least 90%, preferably 95%, in particular 97% similar thereto obtained by means of a production method using a gene fragment according to any of FIGS. 1, 3-8, 10, 11, 13, 14, 15, 17-27 or 31-33, in particular 20 or 21.

[0185] The invention further relates to antibodies for a peptide or protein already described as a subject of the invention. Here it is preferred if the antibody is a monoclonal or polyclonal antibody.

[0186] The particularly favoured form of the antibody is for a peptide or protein encoded by a polynucleotide according to FIGS. 1, 3-8, 10, 11, 13, 14, 15, 17-27 or 31-33, in particular 20 or 21 or a polynucleotide at least 90%, preferably 95%, in particular 97% similar thereto, or encoded by a polynucleotide, or a polynucleotide at least 90%, preferably 95%, in particular 97% similar thereto containing the sequence according to FIGS. 1, 3-8, 10, 11, 13, 14, 15, 17-27 or 31-33, in particular 20 or 21 or by a polynucleotide or a polynucleotide at least 90%, preferably 95%, in particular 97% similar thereto obtained by means of a production method using a gene fragment according to any of FIGS. 1, 3-8, 10, 11, 13, 14, 15, 17-27 or 31-33, in particular 20 or 21.

[0187] The invention further relates to a cell containing a polynucleotide already described as a subject of the application, a peptide or protein already described as a subject of the application and/or or a vector already described as a subject of the application. It is particularly preferred if the cell is an amphibian cell, a bacteria cell, a yeast cell, an insect cell or an immortalised or native mammalian cell. Examples of amphibian cells are Xenopus oocytes, examples of bacteria cells are E.coli cells, examples of yeast cells Saccharomyces cerevisiae, examples of insect cells Sf9 cells, examples of immortalised mammalian cells HeLa cells and of native mammalian cells CHO (Chinese Hamster Ovary) cells.

[0188] The particularly favoured form of the cell contains the particularly favoured form of the polynucleotide, the particularly favoured form of the peptide or protein and/or the particularly favoured form of the vector.

[0189] The invention further relates to a transgenic non-human mammal, whose germ cells and somatic cells contain a polynucleotide already described as a subject of the invention as the result of introducing a chromosome or chromosomes into the genome of the animal or into the genome of any of the predecessors of said animal. By introducing a chromosome or chromosomes it is understood that the genetic manipulative intervention produces an effect in the chromosome of the animal.

[0190] The invention further relates to a transgenic non-human mammal, whose germ cells and somatic cells contain any of the nucleotide sequences according to any of Claims 14-21 as the result of chromosomal manipulation in the genome of the animal or in the genome of any of the predecessors of said animal, the sequence no longer being in expressible form. The chromosomal manipulation related to the gene of the animal or its ancestors. By no longer expressible it is understood that the information for synthesis of a polypeptide or of a protein, although available in native form, no longer allows complete synthesis. Examples are alteration of the regulatory sequences or cutting out of a part of the native nucleic acid molecule in the coding region.

[0191] It is particularly preferred if the transgenic non-human mammal is a rodent.

[0192] The particularly favoured form of the transgenic non-human mammal is when the nucleotide sequence corresponds to the particularly favoured form of the polynucleotide.

[0193] The invention further relates to a compound identifiable as a pain-regulating substance by means of a method according to the invention. Here compound relates in particular to low-molecular active ingredients, but also to peptides, proteins and nucleic acids. Identifiable means here that, in the screening method according to the invention, the compound shows the characteristic of binding substantially more strongly, preferably twice as strongly as the average of the substances to be tested or, with respect to the change in functional parameters, it deviates clearly from the average of the substances to be tested.

[0194] A particularly favoured form of the compound according to the invention is identifiable as a pain-regulating substance by means of a method using the known proteins JNK3, PIM-2, LR-11, TFIIFβ, GGT-β, GATA3, CLC-7, catalase, tetraspanin (TM4SF/TSPAN-6/TM4-D), casein kinase 1a, MAP3K7/TAK-1 (TGF-β activated kinase), BAB14112 and/or spermidine synthase, a peptide or protein which or part of which is encoded by a polynucleotide according to any of FIGS. 34a), 34c), 34e), 34g), 35a), 35c), 35e), 36a), 36c), 37a), 37c), 38a), 38c), 39a), 39c), 39e), 40a), 40c), 40e), 41a), 41c), 41e), 42a), 42e), 43c), 43e), 44e), 45a), 45c), 45e), or 46e) or by a polynucleotide which is at least 90% preferably 95%, in particular 97% similar thereto, or a peptide or protein having an amino acid sequence according to any of FIGS. 34b), 34d), 34f), 34h), 35b), 35d), 35f), 36b), 36d), 37b), 37d), 38b), 38d), 39b), 39d), 40b), 40d), 40f), 41b), 41d), 41f), 42b), 42f), 43d), 43f), 44f), 45b), 45d), 45f) or 46f) or a peptide or protein at least 90%, preferably 95%, in particular 97% similar thereto and/or a protein, encoded by a nucleic acid which, under stringent conditions, binds to a polynucleotide according to any of FIGS. 34a), 34c), 34e), 34g), 35a), 35c), 35e), 36a), 36c), 37a), 37c), 38a), 38c), 39a), 39c), 39e), 40a), 40c), 40e), 41a), 41c), 41e), 42a), 42e), 43c), 43e), 44e), 45a), 45c), 45e), or 46e), or the antisense thereof and/or a partial protein at least 10, preferably 15, in particular at least 20 amino acids long, of one or the aforementioned proteins and/or peptides.

[0195] An equally particularly favoured form of the compound according to the invention is identifiable by means of a method in which the peptide or protein in steps (a) and (b) is encoded by a gene consisting of a polynucleotide containing a gene fragment according to any of FIGS. 1, 3-8, 10, 11, 13, 14, 15, 17-27 or 31-33, in particular 20 or 21, or a polynucleotide at least 90%, in particular 95%, preferably 97% similar to the gene.

[0196] Equally preferred is a compound identifiable by means of a method in which the peptide or protein in steps (a) and (b) is encoded by a gene consisting of a polynucleotide containing a gene fragment according to any of FIGS. 2, 9, 12, 16 or 28-30, or a polynucleotide at least 90%, in particular 95%, preferably 97% similar to the gene.

[0197] The invention further relates to an active ingredient which binds to a peptide or protein according to the invention, and it is particularly preferred if the active ingredient is a low-molecular active ingredient.

[0198] A particularly favoured form of the active ingredient is if the active ingredient binds to the particularly favoured form of the peptide or protein.

[0199] The invention further relates to a medicament containing at least one polynucleotide according to the invention, one peptide or protein according to the invention, one vector according to the invention, one antibody according to the invention, one cell according to the invention, one compound according to the invention and/or one active ingredient according to the invention and, optionally, appropriate auxiliary or additional substances. The medicaments according to the invention can be administered in liquid form, in the form of injection solutions, drops or mixtures, as semi-solid medicaments in the form of granules, tablets, pills, patches, capsules, plasters or aerosols and, depending on the form of the medicament, can optionally contain carrier material, thickening, solvents, diluents, colouring and binding agents as well as at least one subject according to the invention. The choice of auxiliary substances and the amounts of the same to be used depends on whether the medicament is to be applied orally, perorally, parenterally, intravenously, intraperitoneally, intradermally, intramuscularly, intranasally, buccally, rectally, or locally, for example on to infections on the skin, mucus membranes and on the eyes. For oral application preparations in the form of tablets, dragees, capsules, granules, drops, liquids and syrups are suitable, for parenteral or topical application and for inhalation solutions, suspensions, easily reconstitutable dry preparations and sprays are suitable. Subjects according to the invention in dissolved form in a depot or in a plaster, optionally with additives to promote skin penetration, are appropriate preparations for percutaneous application. Preparations which can be used orally or percutaneously can release the subjects according to the invention over a delayed period of time. The quantity of the active ingredient to be administered to patients varies depending on the weight of the patient, the method of application, the indication and the seriousness of the illness. Usually 2 to 500 mg/kg of at least one subject according to the invention are administered. If the medicament is to be used in particular for gene therapy, a physiological saline solution, stabilisers, proteinase inhibitors, DNAse inhibitors etc are recommended as appropriate auxiliary or additional substances.

[0200] Furthermore, a medicament containing preferred forms or the particularly favoured form(s) of the polynucleotide(s), peptide or protein, vector, antibody, cell, compound and/or active ingredient is particularly preferred.

[0201] Here it can be particularly preferred if the medicament contains a preferred compound according to the invention identifiable as a pain-regulating substance by means of a method using the known proteins JNK3, PIM-2, LR-11, TFIIFβ, GGT-β, GATA3, CLC-7, catalase, tetraspanin (TM4SF/TSPAN-6/TM4-D), casein kinase 1a, MAP3K7/TAK-1 (TGF-β activated kinase), BAB14112 and/or spermidine synthase, a peptide or protein which, or a part of which, is encoded by a polynucleotide according to any of FIGS. 34a), 34c), 34e), 34g), 35a), 35c), 35e), 36a), 36c), 37a), 37c), 38a), 38c), 39a), 39c), 39e), 40a), 40c), 40e), 41a), 41c), 41e), 42a), 42e), 43c), 43e), 44e), 45a), 45c), 45e), or 46e) or by a polynucleotide which is at least 90%, preferably 95%, in particular 97% similar thereto, or a peptide or protein having an amino acid sequence according to any of FIGS. 34b), 34d), 34f), 34h), 35b), 35d), 35f), 36b), 36d), 37b), 37d), 38b), 38d), 39b), 39d), 40b), 40d), 40f), 41b), 41d), 41f), 42b), 42f), 43d), 43f), 44f), 45b), 45d), 45f) or 46f) or a peptide or protein at least 90%, preferably 95%, in particular 97% similar thereto, and/or a protein encoded by a nucleic acid which, under stringent conditions, binds to a polynucleotide according to any of FIGS. 34a), 34c), 34e), 34g), 35a), 35c), 35e), 36a), 36c), 37a), 37c), 38a), 38c), 39a), 39c), 39e), 40a), 40c), 40e), 41a), 41c), 41e), 42a), 42e), 43c), 43e), 44e), 45a), 45c), 45e), or 46e) or the antisense thereof and/or a partial protein at least 10, preferably 15, in particular at least 20 amino acids long, of one of the aforementioned proteins and/or peptides.

[0202] It is also preferred if the medicament is a compound identifiable by means of a method in which the peptide or protein in steps (a) and (b) is encoded by a gene consisting of a polynucleotide containing a gene fragment according to any of FIGS. 1, 3-8, 10, 11, 13, 14, 15, 17-27 or 31-33, in particular 20 or 21, or by a polynucleotide at least 90%, in particular 95%, preferably 97% similar to the gene, or contains an active substance which binds to the particularly favoured form of the peptide or protein.

[0203] The invention further relates to a diagnostic reagent containing at least one polynucleotide, peptide or protein, vector, antibody or parts thereof according to the invention, and/or one cell according to the invention and, optionally appropriate additives. By diagnostic reagent an aid to diagnosis, for example of an occurrence of illness, is understood here.

[0204] A diagnostic reagent containing the particularly favoured form of the polynucleotide, peptide or protein or a part thereof, of the vector, antibody, and/or cell is particularly preferred.

[0205] Also preferred is a form of the diagnostic reagent containing a preferred polynucleotide, where this is an antisense polynucleotide or PNA showing a sequence capable of binding specifically to a polynucleotide according to the invention.

[0206] The invention further relates to the use according to the invention of a polynucleotide, peptide or protein, vector, antibody, cell, compound, active ingredient and/or an active ingredient which binds to a peptide or protein selected from the following group for the production of a medicament for the treatment of pain:

[0207] JNK3, PIM-2, LR-11, TFIIFβ, GGT-β, GATA3, CLC-7, catalase, tetraspanin (TM4SF/TSPAN-6/TM4-D), casein kinase 1a, MAP3K7/TAK-1 (TGF-β activated kinase), BAB14112 and/or spermidine synthase,

[0208] a peptide or protein, which or a part of which is encoded by a polynucleotide according to any of FIGS. 34a), 34c), 34e), 34g), 35a), 35c), 35e), 36a), 36c), 37a), 37c), 38a), 38c), 39a), 39c), 39e), 40a), 40c), 40e), 41a), 41c), 41e), 42a), 42e), 43c), 43e), 44e), 45a), 45c), 45e), or 46e) or by a polynucleotide which is at least 90% preferably 95%, in particular 97% similar thereto

[0209] a peptide or protein having an amino acid sequence according to any of FIGS. 34b), 34d), 34f), 34h), 35b), 35d), 35f), 36b), 36d), 37b), 37d), 38b), 38d), 39b), 39d), 40b), 40d), 40f), 41b), 41d), 41f), 42b), 42f), 43d), 43f), 44f), 45b), 45d), 45f) or 46f) or a peptide or protein at least 90%, preferably 95%, in particular 97% similar thereto

[0210] and/or a protein, which is encoded by a nucleic acid which, under stringent conditions, binds to a polynucleotide or the antisense thereof according to any of FIGS. 34a), 34c), 34e), 34g), 35a), 35c), 35e), 36a), 36c), 37a), 37c), 38a), 38c), 39a), 39c), 39e), 40a), 40c), 40e), 41a), 41c), 41e), 42a), 42e), 43c), 43e), 44e), 45a), 45c), 45e), or 46e) and/or

[0211] a partial protein at least 10 preferably 15, in particular at least 20 amino acids long, of any of the aforementioned proteins and/or peptides.

[0212] Particularly preferred is the use for the treatment of chronic pain.

[0213] Also preferred is use of the particularly favoured form of the polynucleotide, peptide or protein, vector, antibody, cell, compound, active ingredient and/or an active ingredient which binds to a peptide or protein selected from the following group for the production of a medicament for the treatment of pain:

[0214] JNK3, PIM-2, LR-11, TFIIFβ, GGT-β, GATA3, CLC-7, catalase, tetraspanin (TM4SF/TSPAN-6/TM4-D), casein kinase 1a, MAP3K7/TAK-1 (TGF-β activated kinase), BAB14112 and/or spermidine synthase,

[0215] a peptide or protein which, or a part of which, is encoded by a polynucleotide according to any of FIGS. 34a), 34c), 34e), 34g), 35a), 35c), 35e), 36a), 36c), 37a), 37c), 38a), 38c), 39a), 39c), 39e), 40a), 40c), 40e), 41a), 41c), 41e), 42a), 42e), 43c), 43e), 44e), 45a), 45c), 45e), or 46e) or a polynucleotide at least 90%, preferably 95%, in particular 97% similar thereto, or

[0216] a peptide or protein having an amino acid sequence according to any of FIGS. 34b), 34d), 34f), 34h), 35b), 35d), 35f), 36b), 36d), 37b), 37d), 38b), 38d), 39b), 39d), 40b), 40d), 40f), 41b), 41d), 41f), 42b), 42f), 43d), 43f), 44f), 45b), 45d), 45f) or 46f) or a peptide or protein at least 90%, preferably 95%, in particular 97% similar thereto.

[0217] A further strongly preferred use for the treatment of pain concerns the first particularly favoured form of the compound and/or an active ingredient which binds to a peptide or protein selected from the following group:

[0218] JNK3, PIM-2, LR-11, TFIIFβ, GGT-β, GATA3, CLC-7, catalase, tetraspanin (TM4SF/TSPAN-6/TM4-D), casein kinase 1a, MAP3K7/TAK-1 (TGF-β activated kinase), BAB14112 and/or spermidine synthase,

[0219] a peptide or protein which, or a part of which is encoded by a polynucleotide according to any of FIGS. 34a), 34c), 34e), 34g), 35a), 35c), 35e), 36a), 36c), 37a), 37c), 38a), 38c), 39a), 39c), 39e), 40a), 40c), 40e), 41a), 41c), 41e), 42a), 42e), 43c), 43e), 44e), 45a), 45c), 45e), or 46e) or a polynucleotide at least 90%, preferably 95%, in particular 97% similar thereto, or

[0220] a peptide or protein having an amino acid sequence according to any of FIGS. 34b), 34d), 34f), 34h), 35b), 35d), 35f), 36b), 36d), 37b), 37d), 38b), 38d), 39b), 39d), 40b), 40d), 40f), 41b), 41d), 41f), 42b), 42f), 43d), 43f), 44f), 45b), 45d), 45f) or 46f) or a peptide or protein at least 90%, preferably 95%, in particular 97% similar thereto.

[0221] A further strongly preferred use for the treatment of pain concerns the second particularly favoured form of the compound and/or the particularly favoured form of the active ingredient.

[0222] Use of a polynucleotide, peptide or protein, vector, antibody and/or cell according to the invention for gene therapy. It is particularly preferred if it is in vivo or in vitro gene therapy. By gene therapy a form of therapy is understood in which, by introducing nucleic acids into cells, an effector gene, usually a protein, is expressed. In vivo and in vitro methods differ in principle. In in vitro methods cells are removed from the organism and transfected with vectors ex vivo before being reintroduced into the same or into another organism. In in vivo gene therapy, in the fight against tumours, for example, vectors are applied systemically (e.g. via the bloodstream) or directly into the tumour.

[0223] Said use is particularly preferred if the polynucleotide, in particular the particularly favoured form thereof the second particularly favoured form of the polynucleotide defined by the production process is used.

[0224] Also preferred for application in gene therapy is the use of the first particularly favoured form of the polynucleotide.

[0225] Also preferred for application in gene therapy is the use of a polynucleotide when it is an antisense polynucleotide or PNA showing a sequence capable of binding specifically to a polynucleotide according to the invention, or which is part of a ribozyme or other DNA enzyme or of a catalytic RNA or DNA.

[0226] The invention further relates to the use of a polynucleotide, peptide or protein, vector, antibody, cell, compound, and/or an active ingredient according to the invention for diagnosis and/or for studies of effectiveness. By diagnosis the analysis of symptoms belonging to an illness is understood, and by studies of effectiveness studies concerning the effectiveness of substances to be tested are meant, in particular their medicinal effectiveness.

[0227] The invention further relates to another screening process, namely a method with the following process steps for discovering pain-regulating substances:

[0228] (a) incubation of a substance to be tested under appropriate conditions with a cell and/or a preparation from such a cell which has synthesised a peptide or protein encoded by a polynucleotide defined by the production method, preferably the second particularly favoured form of the polynucleotide or a polynucleotide at least 90%, preferably 95%, in particular 97% similar thereto.

[0229] (b) measurement of the binding of the test substance to the peptide or protein synthesised by the cell, or measurement of at least one of the functional parameters altered by the binding of the test substance to the peptide or protein.

[0230] It is preferred if the cell is genetically manipulated before step (a). It is particularly preferred if the genetic manipulation allows measurement of at least one of the functional parameters altered by the test substance. It is also particularly preferred if the cell is genetically manipulated in such a way that the cell contains at least one polynucleotide defined by the production method, preferably the second particularly preferred form of the polynucleotide or a polynucleotide at least 90%, preferably 95%, in particular 97% similar thereto.

[0231] A further preferred embodiment of the method is if the cell is cultivated, optionally under selection pressure, after the genetic manipulation and before step (a), under conditions which allow expression.

[0232] The invention further relates also to a method for producing a peptide or protein according to the invention in which a cell 33-35 according to the invention containing a polynucleotide or vector according to the invention, is cultivated and, optionally, the peptide or protein is isolated.

[0233] The invention further relates to the use of a peptide or protein selected from any of the following groups:

[0234] JNK3, PIM-2, LR-11, TFIIFβ, GGTβ-, GATA3, CLC-7, catalase, tetraspanin (TM4SF/TSPAN-6/TM4-D), casein kinase 1a, MAP3K7/TAK-1 (TGF-β activated kinase), BAB14112 and/or spermidine synthase,

[0235] a peptide or protein, for which or for a part of which a polynucleotide codes according to any of FIGS. 34a), 34c), 34e), 34g), 35a), 35c), 35e), 36a), 36c), 37a), 37c), 38a), 38c), 39a), 39c), 39e), 40a), 40c), 41a), 41c), 41e), 42a), 42e), 43c), 43e), 44e), 45a), 45c), 45e), or 46e) or for which a polynucleotide codes which is at least 90% similar thereto

[0236] a peptide or protein having an amino acid sequence according to any of FIGS. 34b), 34d), 34f), 34h), 35b), 35d), 35f), 36b), 36d), 37b), 37d), 38b), 38d), 39b), 39d), 40b), 40d), 40f), 41b), 41d), 41f), 42b), 42f), 43d), 43f), 44f), 45b), 45d), 45f) or 46f) or a peptide or protein at least 90% similar thereto

[0237] and/or a protein, which is encoded by a nucleic acid which, under stringent conditions, binds to a polynucleotide according to any of FIGS. 34a), 34c), 34e), 34g), 35a), 35c), 35e), 36a), 36c), 37a), 37c), 38a), 38c), 39a), 39c), 39e), 40a), 40c), 40e), 41a), 41c), 41e), 42a), 42e), 43c), 43e), 44e), 45a), 45c), 45e), or 46e), or the antisense thereof

[0238] a partial protein at least 10 amino acids long, of any of the aforementioned proteins and/or peptides and/or

[0239] a peptide or protein encoded by a a gene consisting of a polynucleotide, whose nucleotide sequence comprises a gene fragment according to any of the sequences represented in FIGS. 1-33 or by a polynucleotide which is at least 90% similar to such a gene.

[0240] The invention further relates to a polynucleotide corresponding by at least 90%, preferably 95%, in particular 97% or precisely to the nucleotide sequence represented in FIG. 35e).

[0241] The invention further relates to a protein corresponding by at least 90%, preferably 95%, in particular by at least 97% or precisely to the amino acid sequence represented in FIG. 35f).

[0242] The invention further relates to a method for the treatment, in particular the treatment of pain, of a non-human mammal or of a human being in need of treatment for pain, in particular chronic pain, by administering a substance which binds to a protein or peptide selected from the following group:

[0243] JNK3, PIM-2, LR-11, TFIIFβ, GGT-β, GATA3, CLC-7, catalase, tetraspanin (TM4SF/TSPAN-6/TM4-D), casein kinase 1a, MAP3K7/TAK-1 (TGF-β activated kinase), BAB14112 and/or spermidine synthase,

[0244] a peptide or protein, for which or for a part of which a polynucleotide codes according to any of FIGS. 34a), 34c), 34e), 34g), 35a), 35c), 35e), 36a), 36c), 37a), 37c), 38a), 38c), 39a), 39c), 39e), 40a), 40c), 40e), 41a), 41c), 41e), 42a), 42e), 43c), 43e), 44e), 45a), 45c), 45e), or 46e) or for which a polynucleotide codes which is at least 90% similar thereto

[0245] a peptide or protein having an amino acid sequence according to any of FIGS. 34b), 34d), 34f), 34h), 35b), 35d), 35f), 36b), 36d), 37b), 37d), 38b), 38d), 39b), 39d), 40b), 40d), 40f), 41b), 41d), 41f), 42b), 42f), 43d), 43f), 44f), 45b), 45d), 45f) or 46f) or a peptide or protein at least 90% similar thereto

[0246] and/or a protein which is encoded by a nucleic acid which binds under stringent conditions to a polynucleotide according to any of FIGS. 34a), 34c), 34e), 34g), 35a), 35c), 35e), 36a), 36c), 37a), 37c), 38a), 38c), 39a), 39c), 39e), 40a), 40c), 40e), 41a), 41c), 41e), 42a), 42e), 43c), 43e), 44e), 45a), 45c), 45e), or 46e), or the antisense thereof

[0247] a partial protein at least 10 amino acids long of any of the aforementioned proteins and/or peptides and/or

[0248] a peptide or protein for which a gene consisting of a polynucleotide codes, whose nucleotide sequence contains a gene fragment according to any of the sequences represented in FIGS. 1-33 or for which a polynucleotide codes which is at least 90% similar to such a gene.

[0249] Administration can take place, for example, in the form of a medicament as described above.

[0250] The invention further relates to a method for the treatment, in particular the treatment of pain, of a non-human mammal or of a human being in need of treatment for pain, in particular chronic pain, by administering a medicament according to the invention, in particular one containing a substance according to the invention and/or an active ingredient according to the invention.

[0251] All in all an important basis of the invention is the identification of pain-regulated genes and gene fragments. The screening method is based on this. However, it is possible to use the method for diagnosis or treatment as already explained. Corresponding possibilities for use and further embodiments are explained below.

[0252] 1. Treatment of Chronic Pain

[0253] The sequences were isolated from spinal cord tissue. In the spinal cord, the primary sensory neurones project onto central nervous neurones downstream; in addition to supraspinal processes, processes centred round the central synapse for nociceptive information are involved. Numerous experiments have been able to demonstrate that plastic changes in the nervous system are at the origin of the development of chronic pain conditions (for an overview see Corderre et al., 1993; Zimmermann and Herdegn, 1996). Plastic changes which are accompanied by the regulation of pain-relevant genes have been described in particular in the neurones in the dorsal root ganglia and the spinal cord. Thus gene regulation in the spinal cord (see Table 1) has been described for a number of neurotransmitter receptors that are important for pain therapy. On this basis the cDNA sequences found, which are regulated when pain occurs, can be used for treatment (gene therapy, antisense, ribozyme) and diagnosis of chronic pain conditions.

[0254] 1.1 Antisense Strategies

[0255] Here constructs which can reduce the mRNA or protein concentration are established, derived from the nucleic acid sequence of full-length cDNA or partial regions. Said constructs can be, for example, antisense oligonucleotides (DNA or RNA) which demonstrate an increased stability to nucleases, possibly using modified nucleotide components (e.g. 0-allyl ribose). Furthermore, the use of ribozymes which, as enzymatically active RNA molecules, catalyse a specific cleavage of the RNA is conceivable. In addition, vectors that express the sequences according to the invention or express partial regions of said nucleotide sequences under the control of a suitable promoter and are consequently suitable for in-vivo or ex-vivo therapy could also be used. In addition, also possible are antisense constructs that cannot be broken down by endogenous nucleases or can be broken down only slightly thereby when the phosphate backbone of nucleotide sequences (e.g. PNAs, i.e. peptide nucleic acids) is exchanged, or when non-traditional bases, such as inosine, queosine or wybutosine, and likewise such as acetyl-, methyl-, thio- and similarly modified forms of adenine, cytidine, guanosine u, thymidine and uridine are used.

[0256] 1.2. Antagonists/agonists or Inhibitors/activators of the Gene Products Coded By the Nucleotide Sequences According to the Invention.

[0257] This includes substances that by binding to the gene product alter the function thereof These substances can be:

[0258] 1.2.1. Organic-chemicai molecules which are found in the context of active ingredient screening using as a binding partner the gene products of the cDNA according to the invention.

[0259] 1.2.2. Antibodies, be they polyclonal, chimeric, single-chain, F_{ab-} fragments or fragments from phage banks, which influence the function specifically, preferably as neutralising antibodies via binding to the gene products.

[0260] 1.2.3. Aptamers, i.e. nucleic acids or nucleic acid derivatives having protein-binding properties. These also include so-called spiegelmers which are mirror image oligonucleotides obtained by mirror evolution and therefore stable and which can bind a target molecule with high affinity and highly specifically (Kluβmann et al., 1996).

[0261] 1.3. Gene Therapy

[0262] The sequences described can be used for the treatment of neurological disorders, in particular of chronic pain conditions, said sequences being used after cloning into suitable vectors (e.g. adenovirus vectors or adeno-associated virus vectors) for in vivo or ex vivo treatment in order, for example, to induce an overexpression or underexpression of the endogenous gene product, to correct the sequence of the defective gene product (e.g. by transsplicing with the exogenous construct) or to provide a functional gene product.

[0263] 2. Diagnosis

[0264] Polynucelotide sequences (oligonucelotides, antisense DNA & RNA molecules, PNAs) which are derived from the nucleotide sequences according to the invention could be used for the diagnosis of conditions or disorders that are associated with an expression of said gene sequences. Examples of said conditions or disorders include neurological disorders including chronic pain or neuropathic pain (caused, for example, by diabetes, cancer or AIDS) or neurodegenerative disorders such as Alzheimer's disease, Parkinson's disease, Huntington's chorea, Creutzfeld-Jakob disease, amyotrophic lateral sclerosis and dementias. The nucleotide sequences can be used in a variety of ways (Northern blot, Southern blot, FISH analysis, PRINS analysis, PCR) either for the identification of the gene product or of different diagnostically relevant gene products or for the quantification of the gene product. In addition to nucleic acid diagnosis, antibodies or aptamers for the protein encoded by the nucleic acids according to the invention can be used for diagnosis (e.g. using ELISA, RIA, immunocytochemical or immunohistochemical methods), in order to identify the protein or different forms and to quantify the protein.

[0265] With respect to a genetic diagnosis, nucleic acid probes derived from he nucleotide sequences according to the invention could be used for the determination of the gene locus (e.g. by FISH, FACS, artificial chromosomes such as YACS, BACs or P1 constructs).

[0266] The following examples and figures should explain the invention without restricting it thereto.

### FIGURES AND EXAMPLES

[0267] Figures:

[0268] FIG. 1) Gene fragment 111_{—}16 [a) originally sequenced gene fragment from DDRT-PCR, b) corresponding 1^{st} lengthened gene fragment, c) corresponding 2^{nd} lengthened gene fragment]

[0269] FIG. 2) Gene fragment 111_{—}33 [a) originally sequenced gene fragment from DDRT-PCR, b) corresponding new gene fragment]

[0270] FIG. 3) Gene fragment 111_{—}39

[0271] FIG. 4) Gene fragment 111_{—}45 [a) originally sequenced gene fragment from DDRT-PCR, b) corresponding lengthened gene fragment]

[0272] FIG. 5) Section of gene fragment 113_{—}15

[0273] FIG. 6) Section of gene fragment 113_{—}15

[0274] FIG. 7) Section of gene fragment 113_{—}15 [a) originally sequenced gene fragment from DDRT-PCR, b) corresponding lengthened gene fragment]

[0275] FIG. 8) Gene fragment 113_{—}20

[0276] FIG. 9) Gene fragment 124_{—}29 [a) originally sequenced gene fragment from DDRT-PCR, b) corresponding lengthened gene fragment]

[0277] FIG. 10) Gene fragment 124_{—}4

[0278] FIG. 11) Gene fragment 127_{—}3

[0279] FIG. 12) Gene fragment 127_{—}34 [a) originally sequenced gene fragment from DDRT-PCR, b) corresponding 1^{st} lengthened gene fragment, c) corresponding 2nd lengthened gene fragment]

[0280] FIG. 13) Gene fragment 127_{—}8 [a) originally sequenced gene fragment from DDRT-PCR, b) corresponding more extensive human nucleotide sequence (RUP), c) upstream part of the corresponding mouse nucleotide sequence, d) downstream part of the corresponding mouse nucleotide sequence, e) upstream part of the corresponding rat nucleotide sequence, f) downstream part of the corresponding rat nucleotide sequence].

[0281] FIG. 14) Gene fragment 135_{—}18

[0282] FIG. 15) Gene fragment 135_{—}2

[0283] FIG. 16) Gene fragment 135_{—}7

[0284] FIG. 17) Section of gene fragment 135_{—}9 [a) originally sequenced gene fragment from DDRT-PCR, b) corresponding lengthened gene fragment]

[0285] FIG. 18) Section of gene fragment 135_{—}9 [a) originally sequenced gene fragment from DDRT-PCR, b) corresponding lengthened gene fragment]

[0286] FIG. 19) Gene fragment 141_{—}1

[0287] FIG. 20) Section of gene fragment 141_{—}13 [a) originally sequenced gene fragment from DDRT-PCR, b) corresponding more extensive human nucleotide sequence (related to ABLIM and KIAA 0843), c) corresponding mouse nucleotide sequence, d) corresponding rat nucleotide sequence].

[0288] FIG. 21) Section of gene fragment 141_{—}13 [a) originally sequenced gene fragment from DDRT-PCR, b) corresponding lengthened gene fragment]

[0289] FIG. 22) Gene fragment 141_{—}24 [a) originally sequenced gene fragment from DDRT-PCR, b) corresponding lengthened gene fragment]

[0290] FIG. 23) Gene fragment 141_{—}6

[0291] FIG. 24) Gene fragment 146_{—}10

[0292] FIG. 25) Gene fragment 154_{—}26

[0293] FIG. 26) Gene fragment 154_{—}29

[0294] FIG. 27) Gene fragment 164_{—}12

[0295] FIG. 28) Section of gene fragment 164_{—}24

[0296] FIG. 29) Section of gene fragment 164_{—}24

[0297] FIG. 30) Section of gene fragment 164_{—}24

[0298] FIG. 31) Gene fragment 180_{—}12

[0299] FIG. 32) Gene fragment 180_{—}8

[0300] FIG. 33) Gene fragment 89_{—}28

[0301] FIG. 34a) cDNA-sequence of JNK3, human; α1-subtype; AN: U34820

[0302] FIG. 34b) Amino acid sequence of JNK3, human, α1-subtype; AN: U34820

[0303] FIG. 34c) cDNA sequence of JNK3, human, α2-subtype; AN: U34819

[0304] FIG. 34d) Amino acid sequence of JNK3, human, α1-subtype; AN: U34819

[0305] FIG. 34e) cDNA sequence of JNK3, mouse; AN: AB005665

[0306] FIG. 34f) Amino acid sequence of JNK3, mouse; AN: AB005665

[0307] FIG. 34g) cDNA sequence of JNK3, rat; AN: NM_{—}012806

[0308] FIG. 34h) Amino acid sequence of JNK3, rat; AN: NM_{—}012806

[0309] FIG. 35a) cDNA sequence of PIM-2, human; own clone

[0310] FIG. 35b) Amino acid sequence of PIM-2, human; own clone

[0311] FIG. 35c) cDNA sequence of PIM-2, mouse; AN: L41495

[0312] FIG. 35d) Amino acid sequences of PIM-2, mouse; AN: L41495 various protein lengths:

[0313] 1.) 40 kDa

[0314] 2.) 37 kDa

[0315] 3.) 34 kDa

[0316] FIG. 35e) cDNA sequence of PIM-2, rat; own clone

[0317] FIG. 35f) Amino acid sequence of PIM-2, rat; own clone

[0318] FIG. 35g) Comparison of protein sequences of the PIM-2 sequence represented in 35b) with the human PIM-2 sequence NM 006875 deposited in the gene library

[0319] FIG. 36a) cDNA sequence of LR11, mouse; AN: AB015790

[0320] FIG. 36b) Amino acid sequence of LR11, mouse; AN: AB015790

[0321] FIG. 36c) cDNA sequence of LR11, human; AN: Y08110

[0322] FIG. 36d) Amino acid sequence of LR11, human; AN: Y08110

[0323] FIG. 37a) cDNA sequence of TFIIFβ, rat; AN: D10665

[0324] FIG. 37b) Amino acid sequence of TFIIFβ, rat; AN: D10665

[0325] FIG. 37c) cDNA sequence of TFIIFβ, human; AN: X59745

[0326] FIG. 37d) Amino acid sequence of TFIIFβ, human; AN: X59745

[0327] FIG. 38a) cDNA sequence of GGT, rat; AN: L24116

[0328] FIG. 38b) Amino acid sequence of GGT, rat; AN: L24116

[0329] FIG. 38c) cDNA sequence of GGT, human; AN: L25441

[0330] FIG. 38d) Amino acid sequence of GGT, human; AN: L25411

[0331] FIG. 39a) cDNA sequence of GATA3, mouse; AN: NM_{—}008091

[0332] FIG. 39b) Amino acid sequence of GATA3, mouse; AN: NM_{—}008091

[0333] FIG. 39c) cDNA sequence of GATA3, human; AN: NM_002051

[0334] FIG. 39d) Amino acid sequence of GATA3, human; AN: NM_{—}002051

[0335] FIG. 39e) Partial-cDNA sequence of GATA3, rat; AN: AB000217

[0336] FIG. 40a) cDNA sequence of CCL-7, human; AN: AF224741

[0337] FIG. 40b) Amino acid sequence of CCL-7, human; AN: AF224741

[0338] FIG. 40c) cDNA sequence of CCL-7, rat; AN: Z67744

[0339] FIG. 40d) Amino acid sequence of CCL-7, rat; AN: Z67744

[0340] FIG. 40e) Genomic DNA-sequence of CCL-7, mouse; AN: AH063101

[0341] FIG. 40f) Amino acid sequence of CCL-7, mouse; AN: AH063101

[0342] FIG. 41a) cDNA sequence of catalase, rat; AN: NM_{—}012520

[0343] FIG. 41b) Amino acid sequence of catalase, rat; AN: NM_{—}012520

[0344] FIG. 41c) cDNA sequence of catalase, mouse; AN: NM_{—}009804

[0345] FIG. 41d) Amino acid sequence of catalase, mouse; AN: NM_{—}009804

[0346] FIG. 41e) cDNA sequence of catalase, human; AN: NM_{—}001752

[0347] FIG. 41f) Amino acid sequence of catalase, human; AN: NM_{—}001752

[0348] FIG. 42a) cDNA sequence of casein kinase 1α, rat; AN: U77582

[0349] FIG. 42b) Amino acid sequence of casein kinase 1α, rat; AN: AAB19227

[0350] FIG. 42e) cDNA sequence of casein kinase 1α, human; AN: NM_{—}001892

[0351] FIG. 42f) Amino acid sequence of casein kinase 1α, human; AN: NM_{—}001892

[0352] FIG. 43c) cDNA sequence of tetraspanin-6, mouse; AN: AF053454

[0353] FIG. 43d) Amino acid sequence of tetraspanin-6, mouse; AN: AAC69711

[0354] FIG. 43e) cDNA sequence of tetraspanin TM4-D, human; AN: AF133426

[0355] FIG. 43f) Amino acid sequence of tetraspanin TM4-D, human; AN: AF133426

[0356] FIG. 44e) cDNA sequence of MAP3K7/TAK-1, human; AN: NM_{—}003188

[0357] FIG. 44f) Amino acid sequence of MAP3K7/TAK-1, human;. AN: NM_{—}003188

[0358] FIG. 45a) cDNA sequence of spermidine synthase, rat; ANT: AF337636

[0359] FIG. 45b) Amino acid sequence of spermidine synthase, rat; AN: AAK21288

[0360] FIG. 45c) cDNA sequence of spermidine synthase, mouse; AN: L19311

[0361] FIG. 45d) Amino acid sequence of spermidine synthase, mouse; AN: AAC37666

[0362] FIG. 45e) cDNA sequence of spermidine synthase, human; AN: XM_{—}042276

[0363] FIG. 45f) Amino acid sequence of spermidine synthase, human; AN: XP_{—}042276

[0364] FIG. 46e) cDNA sequence of BAB14112, human; AN: AK022582

[0365] FIG. 46f) Amino acid sequence of BAB14112, human; AN: BAB14112

[0366] FIG. 47) Casein-kinase in various pain models

[0367] FIG. 48) Tetrapanin (TSPAN) in various pain models

[0368] FIG. 49) M3K7-kinase in various pain models

[0369] FIG. 50) Overview of the general cloning strategy used

[0370] FIG. 51) Overview of the regulation of the identified genes and gene fragments

### EXAMPLES

### Example 1

### Identification, Isolation and Sequencing of Pain-regulated Genes

[0371] 1.) Procedure

[0372] The following procedure was selected (for explanation see FIG. 50):

[0373] As the starting point for the isolation of pain-regulated genes, the so-called formalin model in the rat was selected, wherein formalin is injected into the rat's paw. The target tissue in which the pain-regulated expression of the genes according to the invention was demonstrated was the dorsal section of the rat's spinal cord in segments L3-L6. Four methods are available for the isolation of differentially regulated genes:

[0374] cDNA-RDA (cDNA-representational difference analysis; Hubank & Schatz, 1994)

[0375] DDRT-PCR (Differential Display RT-PCR; Liang & Pardee 1992, Bauer et al., 1994),

[0376] Subtractive hybridisation (Watson & Margulies, 1993)

[0377] SAGE (Serial Analysis of Gene expression, Velculescu et al., 1995).

[0378] A comparative evaluation of the above methods led to the selection of DDRT-PCR, since said method, in contrast to subtractive hybridisation and SAGE, is capable of including both up- and down-regulated genes and also rare transcripts and, over and above this, yields an abundance of results within short timespans.

[0379] 2.) Material and Methods

[0380] Isolation and Characterisation of Pain-regulated cDNA- Sequences

[0381] Method according to Liang & Pardee (1992)/U.S. Pat. No. 5,262,311 Modifications:

[0382] 1. Decamer-primer according to Bauer at al. 1993

[0383] 2. OligoDT-primer mixtures according to Sompayrac et al. 1995

[0384] 3. TAE-polyacryl amide-gel electrophoresis

TABLE 2

| | |
|---|---|
| Name | Sequence (in 5′=>3′-orientation) |

Oligonucleotide primers used

| | |
|---|---|
| Deca1 | TACAACGAGG |
| Deca2 | TGGATTGGTC |
| Deca3 | CTTTCTACCC |
| Deca4 | TTTTGGCTCC |
| Deca5 | GGAACCAATC |
| Deca6 | AAACTCCGTC |
| Deca7 | TCGATACAGG |
| Deca8 | TGGTAAAGGG |
| Deca9 | TCGGTCATAG |
| Deca10 | GGTACTAAGG |
| Deca11 | TACCTAAGCG |
| Deca12 | CTGCTTGATG |
| Deca13 | GTTTTCGCAG |
| Deca14 | GATCAAGTCC |
| Deca15 | GATCCAGTAC |
| Deca16 | GATCACGTAC |
| Deca17 | GATCTGACAC |
| Deca18 | GATCTCAGAC |
| Deca19 | GATCATAGCC |
| Deca20 | GATCAATCGC |
| Deca21 | GATCTAACCG |
| Deca22 | GATCGCATTG |
| Deca23 | GATCTGACTG |
| Deca24 | GATCATGGTC |
| Deca25 | GATCATAGCG |
| Deca26 | GATCTAAGGC |
| T7-PCR | ACGACTCACTATAGGGCGAATTGG |
| M13R-PCR | ACACAGGAAACAGCTATGACCATG |
| T7(dT)₁₅ | AAACGACGGCCAGTGAATTGTAATACGACTCACTATAGGCGC |

T₁₅

oligodT-primer mixtures (equimolar mixtures)

| | |
|---|---|
| 3P1 | T₁₂AA+T₁₂AT+T₁₁AC+T₁₁AG |
| 3P2 | T₁₁GA+T₁₁GT+T₁₁CA+T₁₁CT |
| 3P3 | T₁₀GC+T₁₀GG+T₁₀CC+T₁₀CG |

[0385] Animal model: The formalin test represents a suitable model for the region of inflammatory/persistent pain (Duibisson et al., 1997). In said test, 50 μl of 5% formalin solution were injected unilaterally into the hindpaw of adult Wistar-rats and the animals were killed 24 hours after the injection in order to take a tissue sample. Parallel to this, isotonic saline solution was injected into the hindpaw of the control animals.

[0386] Taking of tissue samples. The animals are decapitated, the dorsal spinal column is removed and the spinal cord is eluated from the spinal canal by injection of a large quantity of an ice-cold isotonic saline solution. After removal of the dura, the dorsal half of the region from L3 to L6 is cut out and frozen immediately in liquid nitrogen.

[0387] RNA-isolation. The total RNA was isolated from the tissue samples using the Trizol-Kit (Life Technologies) according to the manufacturer's instructions. The RNA was quantified using UV-spectrometry (extinction at 260 nm) and its integrity was verified using denaturing gel electropheresis in a formaldehyde-agar gel (Sambrook et al., 1989).

[0388] DNase-digestion. Before use in DDRT-PCR, possible traces of genomic DNA were removed by DNase-digestion. In each case, 6 μg RNA were incubated at 37° C. in a total volume of 100 μI in 1× First Strandbuffer (Life Techn.) and 10 Units RNase-free DNasel (Boehringer Mannheim) for 15 minutes. After phenol-chloroform extraction, the RNA was precipitated by adding 1/10 vol. sodium acetate pH 5.2, and 2.5 vol. ethanol, dissolved in DEPC-water, quantified using UV-spectrometry and characterised using formaldehyde agar gel electrophoresis again.

[0389] Reverse Transcription. Each 200 μg Dnasel-digested RNA was first denatured using 2.5 μM oligodT-primer mixture (3P1, 3P2 or 3P3) by 5 minutes incubation at 70° C., chilled on ice and then incubated in a total volume of 20 μl reaction mixture for 60 min at 37° C. The reaction mixture contained 1× First-Strandbuffer (Life Techn.), 10 mM DTT, 18.75 μM of each of dATP, dCTP, dGTP, and dTTP, 20 units of RNasin (Promega) and 200 units Superscript II RNaseH⁻-reverse transcriptase (Life Techn.). The enzyme was subsequently inactivated by heating for 5 minutes to 99° C. and the cDNA mixture was stored at −20° C.

[0390] DDRT-PCR Each 2 μl of the cDNA were subjected in a volume of 20 μl to the polymerase chain reaction (PCR). The reaction mixture contained 1× PCRII-buffer (Perkin-Elmer), 2.5 mM MgCl₂, 2 μM each of dATP, dCTP, dGTP, and dTTP, 0.2 μM decamer-primer (Decal-26), 0.8 μM oligodT- primer mixture (3P1, 3P2 or 3P3) and 2 μCi [α-³³ P]dATP (≧2000 mCi/mmol, Amersham). The PCR mixtures were subjected to the following temperature profile in a PTC200-thermocycler (MJ Research): 3 Min at 94° C.; 40 cycles of 15 sec at 94° C., 1 min at 40° C., within 70 sec heating up to 72° C., 30 sec at 72° C.; 10 min at 72° C. and storage at 4° C.

[0391] Gel electrophoresis and evaluation. The PCR-samples were first concentrated in a vacuum until dried, dissolved in a 4 μl test buffer (0.25% bromphenol blue, 0.250% xylene cyanol FF, 30% glycerine) and each 2 μl section was separated electrophoretically in a 6% tris-taurine-EDTA-polyacryl amide gel (Multiphor-System, Promega) for 2.5 hr. at 50 watts. The gel was subsequently dried for an hour at 80° C. and exposed overnight on a BASIII-detection screen (Fuji). For evaluation, the STORM phosphorus-imager (Molecular Dynamics) was used with ImageQuant-Software. The autoradiographic data were printed in the same scale on film which was then used to cut out the fragments.

[0392] Reamplification of the DDRT-PCR-fragments. Differentially regulated PCR bands were cut out of the gel with a scalpel and eluated from the segment of gel by boiling for 10 minutes in 100 μl bidist. water. 25 μl thereof were again amplified in a total volume of 50 μl using PCR. The PCR-reaction mixture contained 1×PCR-Pufferil (Perkin-Elmer); 1.5 mM MgCl₂; 50 μM of each of dATP, dCTP, dGTP, and dTTP; M 0.2 μM of the corresponding decamer; 1 μM of 1PX oligodT-primer mixture and 2.5 μl units of AmpliTAQ-DNA-polymerase (Perkin-Elmer). The PCR temperature profile corresponded with the original PCR-reaction (see above). The PCR mixtures were then mixed with 10 μl test buffer (0.25% bromphenol blue, 0.25% xylene cyanol FF, 30% glycerine) and separated electrophoretically in a 3% TAE agar gel with 10 μg/ml ethidium bromide and PCR products of the expected size were cut out of the gel.

[0393] Cloning in TA-cloning vectors. The excised fragments were purified using the Qiaquick gel-extraction kit (Qiagen) according to the manufacturer's instructions, reduced until dried and dissolved in 5 μl bidistilled. water. They were subsequently ligated in the pCRII- TOPO-vector using the TOPO TA Cloning Kit (Invitrogen) according to the manufacturer's instructions and transformed in TOP10F′-E.coli cells. The transformation mixture was plated out with 100 μg/ml ampicillin on LB agar plates which had previously been treated with 50 μl of 2% X-Gal (Sigma) and 50 μl of isopropyl thiogalactoside (Sigma). The white bacterial clones obtained after 15 hours incubation at 37° C. were reduced in 5 ml LB-liquid medium with 100 μg/ml ampicillin (100 μg/ml) and incubated overnight at 37° C. under agitation. Plasmid-DNA was isolated from said cultures using the Qiagen-Spin-Miniprep-Kit (Qiagen) according to the manufacturer's instructions and each 5 μl of the plasmid-DNA was characterised by EcoRI-restriction digestion and subsequent TAE agar gel electrophoresis.

[0394] Sequence analysis. Here each 500 ng of the plasmid DNA was sequenced with the T7-PCR primer using the Dye Terminator Cycle Sequencing Kit (Perkin-Elmer) and the reactions were analysed using the automatic sequencer ABI 370 (Applied Biosystems Inc.). The DNA sequences were compared with the gene libraries using bioSCOUT software (LION, Heidelberg).

[0395] Confirmation of the differential regulation of the cloned cDNA sequences.

[0396] Here the so-called Reverse Northern technique was used, wherein the cDNA fragments were bound onto replica filters after PCR amplification and hybridised using radioactively labelled cDNA from control spinal cord versus formalin spinal cord.

[0397] PCR amplification of the cloned cDNA fragments.

[0398] Each 50-100 ng of the plasmid DNA was subjected in a volume of 100 μl to the polymerase chain reaction (PCR). The reaction mixture contained 1× PCRII-buffer (Perkin-Elmer), 1.25 mM MgCl₂, 10% DMSO, 250 μM each of dATP, dCTP, dGTP, and dTTP, 0.8 μM T7 PCR primer, 0.8 μM M13R-PCR primer and 5 units Ampli-TAQ-DNA polymerase (Perkin-Elmer). The PCR mixtures were subjected to the following temperature profile in a PTC200-thermocycler (MJ Research): 3 min at 94° C.; 40 cycles of 15 sec at 94° C., 15 sec at 55° C., 30 sec at 72° C., 72° C. and storage at 4° C. A 5 μl aliquot was separated on a 3% TAE agar gel and where the PCR reaction was successful, the PCR mixtures were purified using the Quiaquick PCR Purification Kit (Qiager) according to the manufacturer's instructions and quantifed using WV spectrometry.

[0399] Production of the slot blot DNA filter. The Hybond N-filters were first immersed for 10 minutes in 6×SSC buffer and clamped into the slot blot apparatus (Schleicher and Schüll). Each 1 μg of the DNA fragments were diluted in 6×SSC buffers, denatured by boiling for 10 minutes and subsequent chilling on ice and sucked onto the filter. The filters were subsequently washed for 10 min in 1.5M NaCl/0.5M NaoH solution and for 10 min in 1 M NaCl/0.5M tris-HCl pH=7.0, dried at room temperature for 30 min and bound to the filter by 5 minutes UV irradiation (302 nm, Transilluminator).

[0400] Production of amplified RNA. (modified according to Poirier et al., 1997 & Superscript Choice System. Life Techn.). Here 5 ng of total-RNA were denatured with 100 ng T7 (dT) 15 primer in a volume of 11 μl for 5 min at 70° C. and chilled on ice. The denatured RNA was then incubated for 1 hour at 42° C. in a total volume of 20 μl with 1×First-Strand buffer (Life Techn.), 10 mM Dtt, 500 μM each of dATP, dCTP, dGTP, and dTTP and 400 units Superscriptil reverse transcriptase (Life Techn.), and cooled to 4° C. For 2nd-strand synthesis, the following were added thereto: 91 μl DEPC-H₂O, 30 μl 2nd-Strandbuffer (Life Tech.), 3 μl 10 mM dNTPs (Boehringer Mannheim), 1 μl E.coli DNA-ligase (10 U/μl; Life Tech.), 4 μl E.coli DNA-polymerase I (10 U/μl Life Tech.), 1 μl Rnase H (2 U/μl; Life Tech.), the mixture was then incubated for 2 hours at 16° C. and after addition of 2 μl T4 DNA-polymerase (5 U/μl; Life Tech.) incubated for a further 5 min at 16° C. Inactivation ensued by adding 10 μl 0.5 M EDTA and 10 min heating to 65° C. After phenol-chloroform-extraction and precipitation using 70 μl 7.5 M NH₄OAc and 500 μl 100% cold ethanol (−20° C.), the precipitate was centrifuged off (5 min 14000 g, RT), washed with 1 ml 70% ethanol, dissolved in 50 μl DEPC-H₂O, and desalinated using a S200-Sephacryl column (Microspin; Pharmacia). An aliqout (2 μl) is quantified using UV-spectrometry. RNA is produced from said double-stranded cDNA by means of in vitro transcription, 50 μl of cDNA (5-10 μg) being incubated in a total volume of 100 μl with 1×transcription buffer (Promega), 7.5 mM rNTPs, 10 μl T7 RNA Polymerase-Mix (Ribomax-Kit; Promega) for 3-4 hours at 37° C. and subsequently cooled to 4° C. After addition of 3 μl RQ1-DNase (Rnase-free; Promega), the mixture is incubated for 15 min at 37° C. After phenol-chloroform-extraction and desalination using a S200-Sephacryl column (Microspin; Pharmacia), an aliqout (2 μl) is quantified using UV-spectrometry.

[0401] Production of the radioactive cDNA probe. Each 2 μg of the amplified RNA is denatured using 0.8 μl of the hexamer primer mixture (=750 ng; Boehringer, Mannheim) by heating for 5 minutes to 70° C. and subsequent chilling on ice, and reverse transcribed in a total volume of 25 μl, 2.5 μl of PCR-buffer (Life Tech.); 2.5 μl of 25 mM MgCl₂; 2.5 μl of 0.1 M DTT; and 1 μl each of 20 mM dATP/dTTP/dGTP; 1 μl of 120 μM dCTP and 5 μl [α-³²P] dCTP being added. After 5 minutes incubation at room temperature, 2 μl Superscriptil-reverse transcriptase (200 U/μl, Life Tech.) were added, and the mixture was incubated for 10 min at 25° C. and subsequently for 50 min at 42° C. After heat-inactivation (15 min at 70° C.) the sample was topped up with DEPC water to 50 μl and the non-incorporated radioactivity was removed using an S200-Sephacryl column (Microspin; Pharmacia). The activity of each 0.5 μl of the eluate was determined in a beta-counter (LKB) by means of Czerenkow radiation. In the remainder of the mixture the RNA was hydrolysed by addition to 6 μl 1 M NaOH/10 mM EDTA-solution and 20 minutes incubation at 68° C., subsequently neutralised by addition to 60 μl 1 M phosphate buffer pH=7.0 and added in each case to the prehybridised replica filters.

[0402] Prehybridisation, hybridisation, washing and evaluation of the filters. The filters are denatured in hybridisation flasks with 10 ml Expresshyb solution (Clontech), and 100 μg/ml of heat-denatured SalmonSperm-DNA (Sigma) are incubated for 20 min at 68° C. After shaking off the prehybridisation mix and adding 5 ml of the same solution, the temperature whereof is 68° C., the above radioactive cDNA probe is pipetted thereto and the filters incubated overnight at 68° C. in a rotating incubator. A plurality of washing steps subsequently ensue with 0.2×SSC/0.1% SDS for 10 min at room temperature; 0.2×SSC/0.1% SDS for 15 min at 42° C. and finally in 0.2×SSC/0.1% SDS for 15 min at 65° C. The filters are welded wet into film and exposed on a BASIII-detection screen (Fuji). For the evaluation, the STORM phosphorus imager (Molecular Dynamics) was used in conjunction with ImageQuant-Software.

[0403] 3.) Results

[0404] Using said method (see FIG. 50) 35 pain-regulated genes (see Table 3 and FIG. 51) were cloned first as a partial sequence, and, in the further development of the working process, in some cases as a lengthened sequence.

[0405] Using the selected animal model as the point of departure, cDNA sequences were cloned from the rat using the cloning strategy applied.

[0406] A total of 27 cDNA sequences hitherto unknown from the prior art and which have not been allocated and 8 known cDNA sequences or gene fragments were cloned from the spinal cord of rats, the expression of said sequences being regulated by conditions of chronic pain (see Table 4—cDNA sequences hitherto unknown from the prior art and which have not been allocated—and Table 5—known cDNAs). With regard to the 27 cDNA sequences that are unknown and which have not been allocated, there is either nothing known in the prior art about the function thereof or in some cases something has become known only as a result of a more in depth analysis. Our studies now confirm that they have a role in pain events. An analysis of the expression pattern in various rat tissues showed, however, a focusing on neuronal tissue in the case of 4 cDNAs (111.39, 111.45, 141.13, 154.29; see Table 5). Said cDNAs are thus particularly interesting for the development of new diagnostic and treatment approaches in chronic pain. The role of the novel cDNAs can be further studied by experiments with antisense oligos or ribozymes.

[0407] Of particular interest is the gene fragment 141-13. The extension of the gene fragment represented in FIGS. 20 and 21 showed in the analysis that a new gene, which is homologous to UNC-115 and other members of the abLIM family but is hitherto unknown, is present here. Together with the expression pattern and considering the interesting role played by UNC-115 in neuronal development, said gene fragment or gene is therefore of particular interest.

[0408] Also of interest is gene fragment 127-8, since said fragment is highly homologous to an obviously highly expressed part of the human genome (AN: NT_{—}009379. 1 on chromosome 11q13.

[0409] For the 8 known cDNAs the functions are known in principle:

[0410] cDNAs having amplified expression under pain:

[0411] Geranylgeranyltransferase

[0412] Catalase

[0413] Transcription factor TFIIFβ

[0414] Transcription factor GATA-3

[0415] LDL-like receptor LR-11

[0416] Cl-Channel CIC7

[0417] cDNAs having reduced expression under pain:

[0418] MAP-kinase/JNK3/SAPKβ

[0419] PIM-2 kinase

[0420] The cDNAs discovered for the gene fragments (GFs) during the more precise analysis are

[0421] GF111.33=spermidine syiithase (up-regulated),

[0422] GF124-29=MAPK3/TAK-1 (down-regulated),

[0423] GF127-34=BAB14112 (down-regulated),

[0424] GF135-7=casein kinase 1 a (down-regulated) and

[0425] GF164-24=tetraspanin (TM4-D/TSPAN-6) (down-regulated).

[0426] Special emphasis should be given here to PIM-2 kinase. For other isotypes of said enzyme, PIM-1 and -3, it was possible to show that said signalling-kinase is involved in learning and memory processes in the hippocampus (Konietzko et al. (1999) EMBO J., 18: 3359-3369).

[0427] Within the scope of the invention a nucleic acid sequence which encodes the full-length rat PIM-2 protein was isolated and characterised (FIG. 35e, 35f). The nucleic acid sequence and the protein sequence for Pim-2 from the rat are hitherto unknown. Furthermore, a full-length, i.e. containing the total encoded region, cDNA was isolated which encodes the human Pim-2 (35a,b). A comparison of the sequence with the published human PIM-2 sequence (Acc. no. U77735) resulted in the following differences:

| Differences | | |
|---|---|---|
| in sequence | Effect | Interpretation |
| *Nt 230: C→T | Thr→Thr | silent mutation, poss. |
| | | polymorphism |
| Nt 515: A→G | Glu→Glu | silent mutation, poss. |
| | | polymorphism |
| Nt 1064: T deletion | Alteration of the reading | new C-terminal is more |
| | frame leads to the altered | similar to mouse and rat |
| | C-terminal protein | sequence than the |
| | sequence | published human PIM-2 |
| | | sequence |
| Nt 1175: A→C | 3′UTR, no effect on | |
| | protein sequence | |

*The designations of the positions relate to the published Pim-2 sequence (Acc.no. U77735).

[0428] Of said differences the deletion of a nucleotide found at position 1064 is of functional relevance since it leads to an alteration in the reading frame and thus results in a protein having a completely different C-terminal protein sequence which is set out below.

[0429] Comparison of the C-terminal ends of the two PIM-2 proteins deduced (for a full comparison see FIG. 35g).

[0430] hPIM-2 (Acc.no.U77735)

[0431] TPQPLQRRPCPFGLULATLSLAWPGLAPNGQKSHPNAMSQG

[0432] hPIM-2 (Patent FIG. 25b). PLNPSKGGPAPLAWSLLP

[0433] A further example is catalase, which removes the H₂O₂ that is harmful to the cell by converting it into O₂ and H₂O.

[0434] The protein kinase JNK-3 is specifically expressed in nerve cells of the central nervous system (Mohit et al., 1995) and for a number of opiate receptors (such as, for example, μ-opiate receptor and ORL-1) the downstream activation of protein kinases from said family of mitogen-activated protein kinases has been described (Li & Chang, 1996; Hawes et al., 1998).

[0435] The protein LR11 is a mosaic protein of the “low density lipoprotein receptor (LDLR)” family (Möwald et al., 1997). The strongest expression of LR11-mRNA was determined in the brain, said expression furthermore being regulated depending on development in a manner that suggests a function in synaptogenesis or neurite growth (Hermann-Borgmeyer et al., 1998).

TABLE 3
Expression of the 27 (mostly) unknown cDNAs in the adult rat

| | | Expression profile of the novel cDNAs in |
|---|---|---|
| Clone/Fig. No. | Regulation | tissues of the adult rat |
| 180.12/31 | up | remains open |
| 180.8/32 | up | remains open |
| 111.16/1 | down | spleen, stomach, spinal cord |
| 111.33/2 | up | kidney, lung, colon, stomach, brain, spinal |
| | | cord |
| 111.39/3 | up | brain, spinal cord |
| 111.45/4 | up | brain, spinal cord (ubiquitous) |
| 113.15/5, 6, 7 | down | ubiquitous |
| 113.20/8 | down | brain, heart, spleen, spinal cord |
| 124.29/9 | down | colon, brain, lung, testis |
| 124.4/10 | up | ubiquitous |
| 127.3/11 | up | specific to testicles |
| 127.34/12 | down | remains open |
| 127.8/13 | up | spleen, spinal cord (ubiquitous) |
| 135.18/14 | down | remains open |
| 135.2/15 | up | remains open |
| 135.7/16 | down | kidney (ubiquitous) |
| 135.9/17, 18 | down | remains open |
| 141.1/19 | down | Unsuccessful |
| 141.13/19, 20 | down | spinal cord (ubiquitous) |
| 141.24/22 | down | liver, spinal cord, skeletal muscle |
| 141.6/23 | down | Ubiquitous |
| 146.10/24 | down | colon, heart, stomach, spinal cord |
| | | (ubiquitous) |
| 154.26/25 | up | kidney, liver, lung |
| 154.29/26 | up | specific to spinal cord |
| 164.12/27 | up | remains open |
| 164.24/28, 29, 30 | down | remains open |
| 89.28/33 | up | ubiquitous (colon, brain, lung, spinal cord, |
| | | testis) |

[0436] Sequence data for the regulated clone

[0437] The following table allows the figures to be allocated to the cDNA-clones/gene fragments that are listed in tabular form.

TABLE 4
Hitherto unknown gene fragments that have not yet been allocated

| FIG. No. | Name of the cDNA | Length (bp) |
|---|---|---|
| 1 | 111_16 | 1268 |
| 2 | 111_33 | 840 |
| 3 | 111_39 | 1540 |
| 4 | 111_45 | 2025 |
| 5 | 113_15 | 1721 |
| 6 | 113_15a | 1009 |
| 7 | 113_15b | 685 |
| 8 | 113_20 | 860 |
| 9 | 124_29 | 1348 |
| 10 | 124_4 | 923 |
| 11 | 127_3 | 741 |
| 12 | 127_34 | 109 |
| 13 | 127_8 | 1508 |
| 14 | 135_18 | 1339 |
| 15 | 135_2 | 177 |
| 16 | 135_7 | 1102 |
| 17 | 135_9a | 478 |
| 18 | 135_9b | 616 |
| 19 | 141_1 | 236 |
| 20 | 141_13a | 1497 |
| 21 | 141_13b | 197 |
| 22 | 141_24 | 2818 |
| 23 | 141_6 | 539 |
| 24 | 146_10 | 1759 |
| 25 | 154_26 | 827 |
| 26 | 154_29 | 1081 |
| 27 | 164_12 | 195 |
| 28 | 164_24a | 538 |
| 29 | 164_24b | 547 |
| 30 | 164_24d | 250 |
| 31 | 180_12 | 90 |
| 32 | 180_8 | 559 |
| 33 | 89_28 | 445 |

[0438] TABLE 5
Gene fragments from known

| FIG. no. of the known | | Length of the gene |
|---|---|---|
| DNA sequence | Name of the cDNA | fragment found (bp) |
| 34 a, c, e, g | b141_15 | 2733 |
| 35 a, c, e | b141_2 | 314 |
| 36 a, c | b141_26 | 338 |
| 37 a, c | b151_32 | 633 |
| 38 a, c | b151_38 | 2201 |
| 39 a, c, e | b154_13 | 190 |
| 40 a, c, e | b20_37a | 389 |
| 40 a, c, e | b20_37b | 109 |
| 41 a, c, e | b69_24 | 720 |

### Example 2a

### In-situ Hybridisation of Various Gene Fragments Discovered or of Known Genes

[0439] Rats were subjected to various pain models, spinal cord sections were obtained some time after the pain was triggered and the expression of each gene or gene fragment was studied by means of in-situ hybridisation using DNA probes or specific antibodies and compared with control animals.

[0440] The models were CFA-induced arthritis (CFA), collagen-induced arthritis (CIA) the formalin-test (formalin), see. D. Dubuisson, S. G. Dennis, Pain 4,161-174 (1977).

[0441] Table 5a shows the results

TABLE 5a

| | | Expres- | | | |
|---|---|---|---|---|---|
| | | sion | Regulation | | |
| Name | Location | level | CFA | CIA | Formalin |
| JNK3 | grey matter | high | high | high | high |
| | DH + VH | | VH, low | | |
| | | | DH | | |
| PIM-2 | grey matter | relatively | high | high | high |
| | DH + VH | high | DH down | DH down | DH down |
| GF135.7 | grey matter | low | DH down | | |
| | VH > DH | | | | |
| GF111.39 | grey matter | very low | 0 | | 0 |
| | DH ≧ VH | | | | |
| GF111.45 | grey matter | very low | high | | high |
| | DH >> VH | | DH > VH | | DH > VH |
| GF141.24 | grey matter | very low | | | high |
| | DH >> VH | | | | DH > VH |

DH = dorsal horn
VH = ventral horn

### Example 2b

### Determination Using RT-PCR of the Expression Level of Various Known Genes (TSPAN, Casein-kinase and M3K7-kinase) According to Various Pain Models

[0442] The range of expression according to various pain models compared with controls in rats was determined by RT-PCR (see above). The results can be seen from FIGS. 47, 48 and 49, wherein the light-coloured columns correspond to the control animals and the shaded columns to the treated animals. The y-axes show relative units (standardised expression level)

### Example 2c

### Cloning of Full-length Human and Rat Sequences, or of the Corresponding Full-Length Gene for the Gene Fragments Found in Example 1 as per FIGS. 1-33

[0443] 1.) Cloning of Full-length Rat cDNA-sequences

[0444] Cloning of full-length rat cDNA-sequences ensues either by screening through cDNA-libraries or by using PCR-based methods

[0445] a) Screening

[0446] The cDNA libraries were established using the RNA of a tissue that expresses the mRNA of the gene being searched for. Single- or double-stranded DNA or RNA-molecules, which are either radioactively labelled (e.g. with [α³²P] dCTP) or non-radioactively labelled (e.g. with digoxigenin-labelled UTP), can be used as probes. The cDNA library, provided in the form of bacteria or phages is placed on agar plates, is hybridised with the nucleic acid probes after transfer onto suitable filter membranes and determined after a stringent washing process. The cDNA clones identified by the above method are further isolated and analysed by means of sequencing (see Sambrooks et al., 1989; Ausubel et al., 1990).

[0447] b) PCR-based Method

[0448] In the PCR-based methods, oligonucleotide primers in sense or antisense orientation are determined and synthesised, using the regulated cDNA-sequences as a starting point. In the conventional 5′-RACE method (Rapid amplification of 5′-cDNA ends), the antisense-orientated primer is used for cDNA-synthesis, the resulting single-stranded cDNA is subsequently lengthened by ligation of an oligonucleotide with RNA-ligase or tailing-reaction with terminal transferase and then subjected to a PCR reaction with a primer located further in (known as a nested primer) and a tail-specific primer. The PCR amplificates are cloned and analysed by means of sequencing. One variant of said method utilises the so-called suppression PCR effect to extend the cDNA sequence both in the 5′ and in the 3′ direction, using the cDNA-template as a point of departure (Marathon cDNA Amplification Kit, Clontech). Here a double-stranded cDNA is obtained using as a point of departure RNA from rat spinal cord, and ligated with specially modified linkers. Said cDNA is then amplified by PCR using a gene-specific primer and a linker-specific primer, and the amplification products are cloned and sequenced.

[0449] 2.) Cloning of Homologous Human cDNA-sequences

[0450] Homologous human cDNA sequences are isolated by modifying the above methods. In conventional screening of cDNA libraries, libraries of human origin are used and hybridisation is carried out under less stringent conditions in order to obtain cDNA-clones that are less homologous too.

[0451] PCR based strategies first attempt to amplify a human cDNA using a plurality of different primers which preferably originate from the encoded region. If this is not successful, then degenerated PCR-primers can be used or less stringent PCR conditions are selected.

### Example 3

### Carrying out the Screening Method By Measuring Binding Through the Suppression of a Radioactively Labelled Ligand

[0452] A nucleic acid segment which encodes the chloride channel CLC-7 is cloned in an expression vector that allows a constitutive expression (e.g. CMV-promoter) or an inducible expression in eukaryotic cells. The DNA is inserted into eukaryotic cells (e.g. CHO cells, HEK293-cells or NIH-3T3-cells) using a suitable transfection method, e.g. using Lipofectamin (Roche Diagnostics). The cells are cultured in the presence of a selection reagent (e.g. zeocin, hygromycin oder neomycin) such that the only cells that survive are those cells that have absorbed the DNA construct and, in cases where selection continues for a fairly long time, have incorporated said construct into the genome.

[0453] Using said cells as a point of departure, membrane fractions are obtained that contain the CLC-7 channel in a large amount and can be used for a binding assay. Said assay consists of 1.) the membrane containing the CLC-7; 2.) a radioactively labelled ligand (e.g. tritium-labelled 4,4′-diisothiocyanostilbene-2,2′-disulfonic acid (DIDS) or [³H]-labelled 4-acetamido-4′-isothiocyanatostilbene-2,2′-disulfonic acid (SITS)); 3.) a binding buffer (e.g. 50 mM HEPES pH 7.4, 1 mM EDTA) and the ligand to be studied for binding activity. In functional studies on CLC-7 expressing oocytes, the substances SITS and DIDS were capable of inhibiting CLC-7-mediated chloride channels (unpublished results: Dr. Diewald, University of Mainz). After incubation of the above reaction mixtures (for 30-60 min for example) at a suitable temperature (mostly room temperature), the non-bound radioactive ligand molecules were filtered off. The remaining quantity of bound [³H]-DIDS or [³H]-SITS is measured after adding a scintillation cocktail in a beta-counter (e.g. Trilux, Wallac). If the test substance shows binding to the CLC-7 channel, said substance is determined as a reduced radioactive insert. Said method is appropriately miniaturised, such that it can be carried out in (96-, 384-oder 1536-well) microtitre plates, in order to carry out said method using a robot in the so-called High throughput Screening (HTS) method.

### Example 4

### Carrying Out the Screening Method According to the Invention Using Measurement of the Functional Parameters Altered By the Binding of the Substance

[0454] A nucleic acid segment which encodes the protein kinase PIM-2 is cloned in an expression vector that allows an inducible expression in prokaryotes, such as, for example, E.coli. Here the nucleic acid segment is modified in such a way that it is expressed as a fusion protein having an additional N- or C-terminal amino acid sequence. The function of the PIM-2 kinase remaining unchanged, said sequence should allow purification using a specific method, e.g. glutathion S-transferase fragment, which allows isolation from the protein mixture by binding to glutathion. After transfection of the bacteria, induction of the gene (e.g. with IPTG in the lac-promoter) and solubilising of the bacteria, the fusion proteins are purified and used in an in vitro kinase experiment. Here 5 μg of protein are complemented at 30° C. for 30 minutes in 50 μl kinasebuffer (20 mM PIPES, pH 7.0, 5 mM MnCl₂, 7 mM β-mercaptoethanol, 0.4 mM spermine, 10 mMrATP) complemented with 10 μCi [γ³²P] ATP. Purified histone H1-Protein (Sigma) or bacterially expressed GST-NFATc1-fusion protein are added as substrates. After the incubation period, the non-incorporated [γ³²P] ATP is filtered off and the amount of incorporated ³²phosphate is determined by β scintillation (Trilux, Wallac). In an experiment to discover novel PIM-2 kinase-inhibitors, the test substances are co-incubated in said mixture and a decrease in the ³²P-incorporation is used as an indicator of an inhibitor. Said method is appropriately miniaturised, such that it can be carried out in (96-, 384-oder 1536-well) microtitre plates, in order to carry out said method using a robot in the so-called High Throughput Screening (FITS) method.

### Example 5

### Example of a Medicament Containing an Active Ingredient Tablet Formulation According to the Invention

[0455] Tablets can be produced by direct compression of mixtures of the active ingredient according to the invention with corresponding auxiliary substances or by compression of granules containing active ingredient (optionally with further auxiliary substances). In said method, the granules can be produced either by wet granulation using, for example, aqueous granulation liquids and subsequent drying of said granules or by dry granulation e.g. by compaction.

Direct compression

| | | | |
|---|---|---|---|
| e.g. per tablet: | 25 | mg | active ingredient according to the invention |
| | 271 | mg | Ludipress ™ (granules for direct tabletting |
| | | | from lactose monohydrate, Povidon K30 and |
| | | | Crospovidon) |
| | 4 | mg | magnesium stearate |
| | 300 | mg | in total |

[0456] Produce a homogeneous mixture of the active ingredient with the auxiliary substances and compress said mixture on a tabletting press into tablets having a Ø of 10 mm.

Dry granulation

| | | | |
|---|---|---|---|
| e.g. per tablet: | 25 | mg | active ingredient according to the invention |
| | 166 | mg | microcrystalline cellulose |
| | 80 | mg | low substituted hydroxypropyl cellulose (I- |
| | | | HPC LH |
| | | | 11 ™) |
| | 5 | mg | highly disperse silicon dioxide |
| | 4 | mg | magnesium stearate |
| | 280 | mg | in total |

[0457] Produce a homogeneous mixture of the active ingredient with the microcrystalline cellulose and the 1-HPC and compact said mixture. After sieving the compactates, the resulting granules are mixed with magnesium stearate and silicon dioxide and compressed on a tabletting press into tablets having a Ø of 9 mm.

Wet granulation

| | | | |
|---|---|---|---|
| e.g. per tablet: | 25 | mg | active ingredient according to the invention |
| | 205 | mg | microcrystalline cellulose |
| | 6 | mg | Povidon K30 |
| | 10 | mg | Crospovidon |
| | 4 | mg | magnesium stearate |
| | 250 | mg | in total |

[0458] Produce a homogeneous mixture of the active ingredient with the microcrystalline cellulose and the Crospovidon and granulate said mixture in a granulator with an aqueous solution of the Povidon. The wet granules are subsequently regranulated and after drying are dried for 10 h (at 50° C.) in a drying cabinet. The dry granules are sieved together with the magnesium stearate and finally mixed and compressed on a tabletting press into tablets having a Ø of 8 mm.

### Example 6

### Example of a Medicament Containing an Active Ingredient Tablet Formulation According to the Invention—Parenteral Solution

[0459] 1 g of an active ingredient according to the invention is dissolved in 11 of water for injection purposes at room temperature and subsequently adjusted to isotonic conditions by adding NaCl (sodium chloride).

[0460] Bibliography:

[0461] Akopian A N, Sivilotti L & Wood J N (1995) Nature 379: 257-262

[0462] Ausubel F M, Brent R, Kingdton R E, Moore D D, Seidman J G, Smith J A & Struhl K eds. (1190) Current protocols in molecular biology. John Wiley & Sons, Inc. New York, N.Y.

[0463] Baba H. Doubell T P, Woolf C J 1999: Peripheral inflammation facilitates Aβ fiber-mediated synaptic input to the substantia gelatinosa of the adult rat spinal cord. J Neurosci 19: 859-867

[0464] Bauer D, Müller H, Reich J, Riedel H Ahrenkiel V, Warthoe P & Strauss M (1993): Identification of differentially expressed mRNA species by an improved display technique (DDRT-PCR) Nucl Acids Res 21: 4272-4280

[0465] Bonini A, Anderson S M, Steiner D F (1997) Molecular cloning and tissue expression of a novel orphan G Protein-coupled receptor from rat lung. Biochem Biophys Res Comm 234: 190-193

[0466] Chih-Cheng et al., (1995): A P2X prinoceptor expressed by a subset of sensory neurons. Nature 377: 428-432

[0467] Corderre T J, Katz J, Vaccarino A L, Melzack R (1993): Contribution of central plasticity to pathological pain: review of clinical and experimental evidence. Pain 52: 259-285

[0468] Dickenson (1995) Novel pharmacological targets in the treatment of pain. Pain Rev., 2, 1-12

[0469] Dubuisson et al., 1997 Pain, 4: 161-174

[0470] Feng Y & Gregor P (1997) Cloning of a novel member of the G Protein-coupled receptor family related to peptide receptors. Biochem Biophys Res Comm 231: 651-654

[0471] Furukawa T, Yang Y, Nakamoto B; Stamatoyannopoulos G, Papayannopoulou T (1996): Identification of new genes expressed in a human erythroleukemia cell line. Bloods Cell Mol & Dis 22: 11-22

[0472] Gunasekar P G, Kanthasamy, A G, Borowitz J L, Isom G E 1995: NMDA receptor activation produces concurrent generation of nitric oxide and reactive oxygen species: implication for cell death. J Neurochem 65: 20162021

[0473] Hawes B E, Fried S, Yao X, Weig B, Graziano M P 1998: Nociceptin (ORL1) and u-Opioid receptors mediate mitogen-activated protein kinase activation in CHO cells through a Gi-coupled signaling pathway: evidence for distinct mechanisms of agonist-mediated desensitization. J Neurochem 71: 10241033

[0474] Hubank M & Schatz D G (1994): Identifying differences in mRNA expression by representational difference analysis of cDNA Nucl Acids Res 22: 56405648

[0475] Klussmann S et al., 1996: Nature Biotechnology 14: 1112-1115

[0476] Li L-Y & Chang K-J 1996: The stimulatory effect of opioids on mitogenactivated protein kinase in chinese hamster ovary cells transfected to express u-opioid receptors. Mol Pharm 50: 599-602

[0477] Liang P & Pardee A B 1992: Differential Display of eukaryotic messenger RNA by means of the polymerase chain reaction. Science 257: 967-971

[0478] Methner A, Hermey G, Schinke B, Hermanns-Borgmeyer I (1997): A novel G Protein-coupled receptor with homology to neuropeptide and chemoattractant receptors expressed during bone development. Biochem Biophys Res Comm 233: 336-342

[0479] Mohit A A, Martin J H & Miller C A 1995: p493F12 Kinase: a novel MAP kinase expressed in a subset of neurons in the human nervous system. Neuron 14: 67-78

[0480] Poirier G M-C, Pyati J, Wan J S, Erlander M G 1997: Screening differentially expressed cDNA clones obtained by differential display using amplified RNA. Nucleic Acids Research 25: 913-914

[0481] Sambrook J, Fritsch E F & Maniatis T 1989: Molecular Cloning: A Laboratory Manual. Second Edition. Cold Spring Harbor Laboratory Press, Cold Spring Harbor

[0482] Sompayrac L, Jane S, Burn T C, Tenen D G & Danna K J 1995: Overcoming limitations of the mRNA differential display technique. Nucleic Acids Research 23: 4738-4739

[0483] Tal M 1996: A novel antioxidant alleviates heat hyperalgesia in rats with an experimental painful neuropathy. Neurreport 7: 1382-1384.

[0484] Tölle T R (1997): Chronischer Schmerz. In: Klinische Neurobiologie, Herdergen T, Tölle T R, Bahr M (Editor): p. 307-336; Spektrum Verlag, Heidelberg.

[0485] U.S. Pat. No. 5.262.3 11 Velculescu V E, Zhang L, Vogelstein B, Kinzler K W (1995): Serial analysis of gene expression. Science 270: 484-487.

[0486] Wan J S, Sharp J S et al. (1996): Cloning differentially expressed mRNAs Nature Biotech 14: 1685-1691.

[0487] Watson J B & Margulies J E (1993) Differential cDNA screening strategies to identify novel stage-specific proteins in the developing mammalian brain. Dev Neurosci 15: 77-86

[0488] Wilks A F (1989) Two putative protein-tyrosine kinases identified by application of the polymerase chain reaction. Poc Natl Acad Sci USA 86: 1603-1607

[0489] Woolf C J, Shortland P, Coggeshall R E 1992: Peripheral nerve injury triggers central sprouting of myelinated afferents. Nature 355: 75-78

[0490] Zimmermann, M & Herdegen, T (1996): Plasticity of the nervous system at the systemic, cellular and molecular levels: a mechanism of chronic pain and hyperalgesia. Progr Brain Res 110: 233-259

The application's sequence listing, which the Patent Office published only in electronic form, follows.

SEQUENCE LISTING (157 sequences)

SEQ ID NO: 1 - DNA, 243 bp, Rattus norvegicus
ctttctaccctgctgtagctaaccgttacacactcccttccactatccccttagggacctcccatttctcagttctgaacctcaacgatgccttcttctctgtccgcaaagcacctttgtcttcacctggactgaacctggcacccccatctctacccaactcacctaaactgtcttacctcaggggttctgggatagccctgaccactgatctcctctctttgtcgatccccaaaaaaaaaa

SEQ ID NO: 2 - DNA, 1268 bp, Rattus norvegicus
  misc_feature (261)..(261): n is a, c, g, or t
  misc_feature (299)..(299): n is a, c, g, or t
ctttctaccctgctgtagctaaccgttacacactcccttccactatccccttagggacctcccatttctcagttctgaacctcaacgatgccttcttctctgtccgcaaagcacctttgtcttcacctggactgaacctggcacccccatctctacccaactcacctagactgtcttacctcaggggttctgggatagccctgaccactgatctcctctctttgtcgatccccaaattaaaactcatacagtatgtagatnatcttttcctctgtggtccatgcctataaattagccanatggacacctctgctcttctaaacttcttctctagctggggctgtacagyctcaccatctaaggtccaattgtctgcccctgtctgttaccccaactcacaaagccattgccttggataacgccttagagttttacttctgtgaacagacaccgtgaccaaggcaactcttataaagacaacatttaattggggctggcttacaggttcagaggttcagtccattgtcatcaaagtgggagcaaggcagtgctcaggcaggcatggggctggaggaactgagagttctacatcttcatctgaaggctgctagcagaatactgacttccagacagctaggatgagggtcttaaagcccacatccacagtgacacacctactccaacagggccacaccttctaatagtgccactcctaggctaagcctattcaaaccatgacagatagaaaacacctaacctatcccttctccctctatgtaacagaaaaataggatacaccgtgggggtcctatgtcctaggccactgactaggatcttcctttcaccaactggcatctatgtcaaggagattagaccttaccacccagggataggcagcctgcaatacacttcagcagctgccaaactccttatgcaggaattgaaaaacctaccactctcttaccactgtcttctcctctcacagcttgcccacctcttagcgtataaaggcttacagactctacctccttcttgggttctctctctccaggtggtagtagtagaggaaggcacacgcatttccaatcatgcccacccctcaacatctcaaatcttcttccccaaccaaactcagactatgcctgttttgttcttgatttgaaaactcagaggaaccactgccccatctcttgcacacacaggaaagcatgttacctcaggccatccataccgggttccccccgtactttgcgttgttaccactgctt

SEQ ID NO: 3 - DNA, 1063 bp, Rattus norvegicus
ctttctaccctgctgtagctaaccgttacacactcccttccactatccccttagggacctcccatttctcagttctgaacctcaacgatgccttcttctctgtccgcaaagcacctttgtcttcacctggactgaacctggcacccccatctctacccaactcacctagactgtcttacctcaggggttctgggatagccctgaccactgatctcctctctttgtcgatccccaaattaaaactcatacagtatgtagatgatcttttcctctgtggtccatgcctataaattagccagatggacacctctgctcttctaaacttcttctctagctggggctgtacagyctcaccatctaaggtccaattgtctgcccctgtctgttaccccaactcacaaagccattgccttggataacgccttagagttttacttctgtgaacagacaccgtgaccaaggcaactcttataaagacaacatttaattggggctggcttacaggttcagaggttcagtccattgtcatcaaagtgggagcaaggcagtgctcaggcaggcatggggctggaggaactgagagttctacatcttcatctgaaggctgctagcagaatactgacttccagacagctaggatgagggtcttaaagcccacatccacagtgacacacctactccaacagggccacaccttctaatagtgccactcctaggctaagcctattcaaaccatgacagatagaaaacacctaacctatcccttctccctctatgtaacagaaaaataggatacaccgtgggggtcctatgtcctaggccactgactaggatcttcctttcaccaactggcatctatgtcaaggagattagaccttaccacccagggataggcagcctgcaatacacttcagcagctgccaaactccttatgcagttcttgacctgtctctcccctgaccctagctggctacatattctctctccctgaaaccctgccccactctcagagccttcagatgtccagctctgccccctcatgcttaataaatgcagtgacaca

SEQ ID NO: 4 - DNA, 840 bp, Rattus norvegicus
  misc_feature (454)..(454): n is a, c, g, or t
  misc_feature (459)..(459): n is a, c, g, or t
  misc_feature (687)..(687): n is a, c, g, or t
  misc_feature (803)..(803): n is a, c, g, or t
cctctagatgcatgctcgagcggccgccagtgtgatggatatctgcagaattcgcccttactcatatagggctcgagcggccgcccgggcaggtctagaattcagcggccgctttttttttttttttttttttttkggggtttgggtttccattttggtttacagcagacctttaatttggacgtttgragggatcaacatcacttgttttgttctgragagaagttcctgatagtgtttctcccctctcacctccagatggactcagttattaaaatttggcgctttaaaaagagtgatgagcagtgcttcaattacagtgacaaaggagaaaaaagtaagaaagcacccatggccttgtcgccaaccttaaaggacattcatattttgctttaaggcttkgtagttgccacagtcaggttacagagctccaagggaccattattgatgttgncattntaagcgacttcagtttgatggagtgattatcttaattttcccatgaatagacttcacctgcctcaggtcactgaacctctcctcttccccagccctccttaaaaatttctacctaggaaccaatcgaagggaaaaaaggctatgactacatggcattcagattcaccccctctagctatgttttattattacttagcttccacgtgacctgggtatagaatcaaacanatgttatggtgaagcatagcggaaaaggtaaaatggccactggggcccaaaatgatgcatgttaaaattctgaccctagtgcgaaggtcttgaaaaaggctttgtggggtccttanagcatgaaaacagaaactgcatggatggattggttcc

SEQ ID NO: 5 - DNA, 716 bp, Rattus norvegicus
  misc_feature (38)..(38): n is a, c, g, or t
  misc_feature (154)..(154): n is a, c, g, or t
  misc_feature (382)..(382): n is a, c, g, or t
  misc_feature (387)..(387): n is a, c, g, or t
ggaaccaatccatccatgcagtttctgttttcatgctntaaggaccccacaaagcctttttcaagaccttcgcactagggtcagaattttaacatgcatcattttgggccccagtggccattttaccttttccgctatgcttcaccataacatntgtttgattctatacccaggtcacgtggaagctaagtaataataaaacatagctagagggggtgaatctgaatgccatgtagtcatagccttttttcccttcgattggttcctaggtagaaatttttaaggagggctggggaagaggagaggttcagtgacctgaggcaggtgaagtctattcatgggaaaattaagataatcactccatcaaactgaagtcgcttanaatgncaacatcaataatggtcccttggagctctgtaacctgactgtggcaactacmaagccttaaagcaaaatatgaatgtcctttaaggttggcgacaaggccatgggtgctttcttacttttttctcctttgtcactgtaattgaagcactgctcatcactctttttaaagcgccaaattttaataactgagtccatctggaggtgagaggggagaaacactatcaggaacttctctycagaacaaaacaagtgatgttgatccctycaaacgtccaaattaaaggtctgctgtaaaccaaaatggaaacccaaaccccmaaaaaaaaaaa

SEQ ID NO: 6 - DNA, 1540 bp, Rattus norvegicus
  misc_feature (668)..(668): n is a, c, g, or t
  misc_feature (1003)..(1003): n is a, c, g, or t
  misc_feature (1018)..(1018): n is a, c, g, or t
  misc_feature (1092)..(1092): n is a, c, g, or t
  misc_feature (1096)..(1096): n is a, c, g, or t
  misc_feature (1453)..(1453): n is a, c, g, or t
gcctgagaaccgtaatcaccaaatgcctgcagcaaaacagaggtgtttgttaagcctttggtatcaggaagcttcgagagaattcatttcttgtctttgaagaggggtggtttcattacaaagagatggaaaggcatggttgaaaattgagctaaaaattagaattgagagagagagagagagagaatagatgattagaacaataattcataatttttgatctaaacatttggaggttgtcttatttgcatttctcttagcttcccctcttagcatcctcatggttttaagcacagctataaatttccatttattcaaatcacaatgcaattgattcttgtgttctccattagaccttgaatgactcagaggcaattcagccatgttttttcttcgttgttactctatcgtgtagcactgtgtgtggtgtccatgtgtgtgcactgaataatgcaatgaaaggcgcatagtgagatgatgctggtttgacattactccgacaaaaaagaaaatgtctgtgtagcaatggtcattactatgaaaatgtggttgttttttaagcattccgtgtgtcacaggaacgggatttaatgagtgtcctaggacctggtaccgcatagaactacgtgtctcagaagcacaggatgtactgaattactttgccagtnacctggtcctcaaaatccctccaccgagttgcttattcaaatcctcacgctcataaatctccatcagccatcactagttgaattacgtttgcctagtgtttctctctaactcccgcaaacctgcttcatgtactctcttcaagactgatgggaagctaattgcttgctacgtttcatgtcctaccatgagtcatgctgtcccaatctcatcctcaaccacccgactctccaacagccaagtcctagagctccaacagggagatggaaattggttactgatcgacttaaaatggcaggattctctcacagggatgtaggctgtgaaaaaaacagangacagtgttaacagngaattgcctagatcctattcattaggttctattcattaggtctgcagagaaaaagaccggcttttgtaatatgntatnagattcagtttaactttccatttgtcctcccctcttcttggtcccccctgtaaggctttaggaaaaaactacctacatattgccaatctttccccaaagacatctgtttttctccacaaatccttacctccgaaaatatatgctaatgaagacagtgattgtttaatgaaaacttcaaatcaggagcccagacctagatctaacagcctcaggcaaatcacaagagcaaatgctgttcagatgtgtaggctccaaatactgtgaattcttaggcggcatcctggagaatcaccaaaaatgttgattcctaacttgaaagtcaacattccagaatagcacttgcagatacatacgganagtctgttctctggctcttttcctatgaaggtcctttaactgcttcgtaataggaaaacattcagtccccaatgcccaaaaaaaaaa

SEQ ID NO: 7 - DNA, 2025 bp, Rattus norvegicus
  misc_feature (37)..(37): n is a, c, g, or t
  misc_feature (40)..(40): n is a, c, g, or t
ttttttttttgggcggggagggggagaggccaagatnttntctttcaagtccagggagcacagaacttggcacacattatcaaaaggtgggaacgaaactaccagggtcagtttcttttaggagcctagcaactacatattccattctgcgggtaggaaccagccatctgttgtggaccctaatttaaactcctcccatacccacaggaaattgatacatactgaagttggaaagtgccggtctaggctttacatgtctggcttttggtacactttccgggtgttagtgtgcagtgagttggggtgggaggtgtttcagtttttgcacgtgctcgtggtttgtaaatgcggcccacaatcaaagacggcaatgtctataaggcaaaaatctaaattgcactctaatccaggtgctctggccttgtgggccaaaccattcctgggactcgataggaggcgctggactgatataagaacacctgtcttgggggtgggggtggttgtaaaggaaccgcagtggatatctggggaagatcaaaccaaggacaggctggggacagcgctggggacagtgcatgcttctttggactctaratgcttgcctgccatcccctccccgggatcctgacatcccaggagcgtggtggttttcagcagttgatcacagtgtaatactttcagttctattccagagtcaggatatgtccaaggaatgcgtgtgtgttgggaataggggcagtctccgggcctggggatgggacaggaggagtttcttggcttgactggtttcttaacgctagcacgctttcacccgctgggagagtttcatgaggtcctcttgtccccgaatatctttgactcgccttattcagtggcctgcgtccagagtgggatctgattatttcgagaacttagacagtacctatgcaagaaggaagccaaacaggtaccaaggctgctggggtggcctctctctggaggtgactccctgggtagctgagatgtattgagaccaagactttgaaaggactcctgagaaggaagggctgggaagctactctcttgtgtaggccatgctcacaggtacacgacaaggggcattgccaataaggaccttggagttcagtggtgtcaggaaaaaaaggcgaatgcaagaacgctgtggacctccagagccgaggaggggagaggggacccaagactggagagaaggcgcctgctttccagctttattggccacctccgctccagcctctgccaaccaccgagcggttgggagggggaggaggtggtcaccatgccattgtggttcctgagtcagccggagcccattgccgccggggagccagactccgtgaaatgttaattatctgttagaaaaaacagtatattttatacaacgttgaaaacaaaacaaaaaaaatctaattcctgagcaggccctgctatttgactcactcaatgtacatttatttatgccccataaaaggtacacgggaagccatgcagtggtcttttttaaaaggcgataacgtgttctttacactaaaccgtaacacctacgcacacagtgattgagttttagtcagaaaggtacccaaagtgacatttcctcccactaatttcacattgcctgtgtagttctggggagtaacattactcttcagcagaaaaaaaaatgttctatcccgtcctggcaacgccacatggcgcttgtattcccgtcagttgttttatcagctcaacttcccccatttctttctgggataactttttctctgatgctagtttgcattttatggagtgtggagtcatggctatttccttgtcctggtcccattaacttcctggtactattgtttgaagcctccagaccctgatgtataatccaactgtttccccactgtgtgggaagagaaagccgttggcctaggtcttgaacaacccaagctctcctttcccatgaaggtgctggcaagactttctggagtgcagttctagaattcagcggccgctgaattctag

SEQ ID NO: 8 - DNA, 2392 bp, Rattus norvegicus
  misc_feature (2353)..(2353): n is a, c, g, or t
  misc_feature (2356)..(2356): n is a, c, g, or t
gtctttgtcatcagaaggaaaatgacgtgttctatgtgtgttgacacagtcaggtttggtaacctcatgaagagcagacatgaatgatgaacacagaggcataatatagtaaatctcaggagccacacagccaagaaacacgtggagcagcaaatgcctggaagactgatattagcaaccacgaggcacatagtaattgctaatcctacacatgaatacccaaaactactctgtgaggtcaagtgctagacttagaggccagtggtgtccttcttcctcttcattatgtcactgagcaagtcatctcagaaactccttaaaaaaaatcctgattccaatcacatcacaccactcaactgcagtgtaaaatcttcctacctgatcttgtgaacctgtcctgcactccagaaagtcttgccagcaccttcatgggaaaggagagcttgggttgttcaagacctaggccaacggctttctcttcccacacagtggggaaacagttggattatacatcagggtctggaggcttcaaacaatagtaccaggaagttaatgggaccaggacaaggaaatagccatgactccacactccataaaatgcaaactagcatcagagaaaaagttatcccagaaagaaatgggggaagttgagctgataaaacaactgacgggaatacaagcgccatgtggcgttgccaggacgggatagaacatttttttttctgctgaagagtaatgttactccccagaactacacaggcaatgtgaaattagtgggaggaaatgtcactttgggtacctttctgactaaaactcaatcactgtgtgcgtaggtgttacggtttagtgtaaagaacacgttatcgccttttaaaaaagaccactgcatggcttcccgtgtaccttttatggggcataaataaatgtacattgagtgagtcaaatagcagggcctgctcaggaattagattttttttgttttgttttcaacgttgtataaaatatactgttttttctaacagataattaacatttcacggagtctggctccccggcggcaatgggctccggctgactcaggaaccacaatggcatggtgaccacctcctccccctcccaaccgctcggtggttggcagaggctggagcggaggtggccaataaagctggaaagcaggcgccttctctccagtcttgggtcccctctcccctcctcggctctggaggtccacagcgttcttgcattcgcctttttttcctgacaccactgaactccaaggtccttattggcaatgccccttgtcgtgtacctgtgagcatggcctacacaagagagtagcttcccagcccttccttctcaggagtcctttcaaagtcttggtctcaatacatctcagctacccagggagtcacctccagagagaggccaccccagcagccttggtacctgtttggcttccttcttgcataggtactgtctaagttctcgaaataatcagatcccactctggacgcaggccactgaataaggcgagtcaaagatattcggggacaagaggacctcatgaaactctcccagcgggtgaaagcgtgctagcgttaagaaaccagtcaagccaagaaactcctcctgtcccatccccaggcccggagactgcccctattcccaacacacacgcattccttggacatatcctgactctggaatagaactgaaagtattacactgtgatcaactgctgaaaaccaccacgctcctgggatgtcaggatcccggggaggggatggcaggcaagcatytagagtccaaagaagcatgcactgtccccagcgctgtccccagcctgtccttggtttgatcttccccagatatccactgcggttcctttacaaccacccccacccccaagacaggtgttcttatatcagtccagcgcctcctatcgagtcccaggaatggtttggcccacaaggccagagcacctggattagagtgcaatttagatttttgccttctagacattgccgtctttgattgtgggccgcatttacaaaccacgagcacgtgcaaaaactgaaacacctcccaccccaactcactgcacactaacacccggaaagtgtaccaaaagccagacatgtaaagcctagaccggcactttccaacttcagtatgtatcaatttcctgtgggtatgggaggagtttaaattagggtccacaacagatggctggttcctacccgcagaatggaatatgtagttgctaggctcctaaaagaaactgaccctggtagtttcgttcccaccttttgataatgtgtgccaagttctgtgctccctggacttgaaaganaanatcttggcctctccccctccccgcccaaaaaaaaaa

SEQ ID NO: 9 - DNA, 1721 bp, Rattus norvegicus
  misc_feature (20)..(20): n is a, c, g, or t
  misc_feature (22)..(22): n is a, c, g, or t
  misc_feature (104)..(104): n is a, c, g, or t
  misc_feature (207)..(207): n is a, c, g, or t
  misc_feature (1448)..(1448): n is a, c, g, or t
  misc_feature (1466)..(1466): n is a, c, g, or t
  misc_feature (1471)..(1471): n is a, c, g, or t
  misc_feature (1488)..(1488): n is a, c, g, or t
  misc_feature (1505)..(1505): n is a, c, g, or t
  misc_feature (1610)..(1610): n is a, c, g, or t
  misc_feature (1633)..(1633): n is a, c, g, or t
  misc_feature (1700)..(1700): n is a, c, g, or t
aagcagtggtaacaacgcanantacgcggggccccccacctccttcctacctgtgcaaaaagtacaactaaaaccaaaccaaaacaaaccaataaacaaaaganaaagaaaactgaaaacaaaacaaaacaaaacaacaaaaacaaaaattcaaaccattcactttacctaacaaggattccaaaacacattttttttcattgacanaattctgggagtatattttcacatgctatttcattagtttaattgctctaaaactgtaatgaccttgaaataattttaaaatgggtttaaaattaacttgtcaaatttcagtttaagactttattgtccgcccacacaatgtaactgcttgtcccctaagtattaaagcagttttacaagcggtggtgtgcagattctcttccactaataatagccttgataataagtcataaggaatggtggctaatgtgagtttagcaggaagccacaaagaaataaaacagcagataccttaagtctgatatttctacattaaaattcaattaccacctctaccaccagttatgagaagccacgatggatacatactagtttccacatttgacatcttctggttttgctgacaccctcattgccctaagatatgatgatgatttcaagatttcwwmwgytyaasamktyaykgtcmkmmcrcatcatcaatattcacagatgttagttccaagccagaaggaaaaaaagaaaagacataacgttgcaggaatatgatctaatcagttgtacaaagttctcaaaaactaagacttaaaaaaaaaaaaaaagtctgatactcttagacaaggcaaagtgggaggtgaagactggtagatccttggagcttcctggccagctaaccttgcctacctgtagaagtttaaaatcaatgagagacacaatttcaaacaaaaggtagacagaacctgagaaaaaacacccaggattttcctgtaaccttcatattgatacacatgtactactctgaagaaaatacacatgcacwggcwcaagcgcgcgcgtgcgcgcgcgcgcacacacwcwcacwcacacacacacacacacacacacacacctcaaaccacaaatagttacttatacaagagatccctttttaaagtagaaatgggaccatacttgacaaaagtgatgcgttttacataaagatatcgaatttgtttaatgcaagcttagtccgaaatggatacttaagtcataaatactcttttggtcatatccctgtttcatatttgatttcttagtaacatctatattcaaaaacagtgtcggaagattttctagaagaachagaaatattttcgcacaatgtyttatcttagtttwwcattagaaaagcakaagaaggaatatttycyggcygtcmmcmgagaatgttccmgaaccactaaaaakaaaarctygtgggnaagggcratwtgccygtngttcnttaaaaataagtattcnggggttgcraaaaaaanttgtcctccttgtttcttttttaaaaaattttgaaaacagtaatcctcatagcctttgcagtttccttcaacttgcaagatatttcacatgtttaccaagcaatnacctaagtgatgtcaccatattntcaccaaaaatacctcctttaatgcttcaggatggtgccacctatagtagaaagccagtgaagtcantttgcgttgttaccactgctt

SEQ ID NO: 10 - DNA, 1009 bp, Rattus norvegicus
  misc_feature (22)..(22): n is a, c, g, or t
  misc_feature (45)..(45): n is a, c, g, or t
  misc_feature (51)..(51): n is a, c, g, or t
  misc_feature (68)..(68): n is a, c, g, or t
  misc_feature (90)..(90): n is a, c, g, or t
  misc_feature (120)..(120): n is a, c, g, or t
  misc_feature (134)..(134): n is a, c, g, or t
  misc_feature (146)..(146): n is a, c, g, or t
  misc_feature (184)..(184): n is a, c, g, or t
  misc_feature (309)..(309): n is a, c, g, or t
  misc_feature (987)..(987): n is a, c, g, or t
  misc_feature (989)..(989): n is a, c, g, or t
  misc_feature (1007)..(1007): n is a, c, g, or t
  misc_feature (1009)..(1009): n is a, c, g, or t
aagcagtggtaacaacgcaaantacgcgggttctgtgtaaagganaagganatgtcggaaaatggaanacatatgtaaagtattggcaantgcaggcaactgggattttgaggcagtcanaacaactgcagganaaactgcagcanaagcctccaactttataatggaagcacaactggctcanatacagatttatcttcaacagctgtatttttggccttttatgttagtgagtatctttcatacctcatggtaattagtgctgactaaatttttgagcttcttcttttctttttttgggggggggtnctctttctttacatttcaattgttattcctttacccagtttcctggtcataagccccctatcccattctcctccccttcttctataagggtgtkccccctcctccctgacatttcccaacactgggactacaatattggatggattatgggtttctcctcccattggtgcccaacaaggccatcctctgctacatatgcagctggarccatagggtctgtctatgtgtagtctttgggtagtggtttagtccctggcagctctgtttggttagtattgttgttattatgaaatttcaagccccttcagctccttcagtccttttctaattcctccaatggggaccctgttctcagttcaatggtttgctgctagtgtcacatctgtatttgacatgctctggctgagcctctcagctatatcaggtgcctgtcagcatgaacttcttggctttatcaatattgtctaattatggtgcctgtataaatatgggctggatcccaaggtgaggtaggctctgaatggccattccctcaggtgaaagtgctggccaaggaatatgggaaaaaraargaamactccctccattgtttgttgggaatgcaaaaatgggtacaatcaatctggaaaatcvatcttgggtkttcttcaaaaaaaattggaaattaaacttacctgnangaaccaacctatacctgntn

SEQ ID NO: 11 - DNA, 685 bp, Rattus norvegicus
  misc_feature (1)..(1): n is a, c, g, or t
  misc_feature (102)..(102): n is a, c, g, or t
ntgcttgatgataggtgggtgaacacaaacacatggaattagtcttgtggttttcttagatttttttaattagggcatttctgaccatgttagaattaaatntatttaaatgcaattagaattgtttagggaagattattgtgtggcagatgaattgagaagatatggtggctgtgctgaaaaaggaatgtgaggaaacacagaagaaaagaaagtgatcagtgtgtacatcaagaagctcaaaaattccttcagtctctgctccaaactttgtctccatatcccctcatatgaatatttcccccttttaagaaggactgaagcatcccyactttggttatccttcttcttgagcttcatgtggtttgtggattatatcttgggtactttgagcttttgggctaatatccacttatcaatgagtgcataccaagtgtgttctgtgtttgggttacctgacacaggacaatattttctagctcattccatttgcctatgtatttcatgaagtcattgtttttgatagctgaatagtactccattgtgtagatgttaccacatccattcctttgttgaaagaaatctgcattctttctaacttcgcattattataaataaarctactatgaacatattggaacaatgtgtctttcctggtatgttggaacaccatttgtgcatatgc

SEQ ID NO: 12 - DNA, 3032 bp, Rattus norvegicus
  misc_feature (2724)..(2724): n is a, c, g, or t
  misc_feature (2849)..(2849): n is a, c, g, or t
  misc_feature (2988)..(2988): n is a, c, g, or t
caatgtaactgcttgtcccctaagtattaaagcagttttacaagcggtggtgtgcagattctcttccactaataatagccttgataataagtcataaggaatggtggctaatgtgagtttagcaggaagccacaaagaaataaaacagcagataccttaagtctgatatttctacattaaaattcaattaccacctctaccaccagttatgagaagccacgatggatacatactagtttccacatttgacatcttctggttttgctgacaccctcattgccctaagatatgatgatgatttcaagatttcaaatgctcaacaagtcacggtcataacgatcatcaatattcacagatgttagttccaagccagaaggaaaaaaagaaaagacataacgttgcaggaatatgatctaatcagttgtacaaagttctcaaaaactaagacttaaaaaaaaaaaaaaagtctgatactcttagacaaggcaaagtgggaggtgaagactggtagatccttggagcttcctggccagctaaccttgcctacctgtagaagtttaaaatcaatgagagacacaatttcaaacaaaaggtagacagaacctgagaaaaaacacccaggattttcctgtaaccttcatattgatacacatgtactactctgaagaaaatacacatgcacaggcacaagcgcgcgcgtgcgcgcgcgcgcacacacacacacacacacacacacacacacacacacacacctcaaaccacaaatagttacttatacaagagatcccttttaaagtagaaatgggaccatacttgacaaaagtgatgcgtttacataaagatatcgaatttgtttaatgcaagcttagtccgaaatggatacttaagtcataaatactcttttggtcatatccctgtttcatatttgatttcttagtaacatctataatcaaaaacagtgtcagaagattatctagaagaacaagaaatatttcgcacaatgtcttatcttagttttacatagaaagcagagaaggaatattttctgctgtcaacaagaatgttccagaccaaaaaagaaaagctcgtggagggcaatatgcctgtgttcttaaaaataagtattggggttgcaaaaaaaacttgtcctccttgtttcttttttaaaaaattttgaaaacagtaatcctcatagcctttgcagtttccttcaacttgcaagatatttcacatgtctaccaagcaattacctaagtgatgtcaccatattctcaccaaaaatacctcctttaatgcttcaggatggtgccacctatagtagaaagccagtgaagtcactctgcgttgttaccactgcttgatgataggtgggtgaacacaaacacatggaattagtcttgtggttttcttagatttttttaattagggcatttctgaccatgttagaattaaatctatttaaatgcaattagaattgtttagggaagattattgtgtggcagatgaattgagaagatatggtggctgtgctgaaaaaggaatgtgaggaaacacagaagaaaagaaagtgatcagtgtgtacatcaagaagctcaaaaattccttcagtctctgctccaaactttgtctccatatcccctcatatgaatatttcccccttttaagaaggactgaagcatccctactttggttatccctcttcttgagcttcatgtggtttgtggattatatcttgggtactttgagcttttgggctaatatccacttatcaatgagtgcataccaagtgtgttctgtgtttgggttacctgacacaggacaatattttctagctcattccatttgcctatgtatttcatgaagtcattgtttttgatagctgagtagtactccattgtgtagatgtaccacatccattcctttgttgaaggacatctgcattctttctagcttcgcattattataaataaagctactatgaacatagtggagcatgtgtctttcttgtatgttggagcatcatttgtgcatatgcccaggagaggtatagctgggtcctcaggtagtgtaatgtccaattttctgaagaacaccaagactgatttccagattgattgtaccattttgcaatcccacaaacaatggaggagtgttcctctttctccatatccttgccagcactgtcacctgagggaatagccattcagagcctacctcaccctgggatccagcccatatttatacaggcaccataactagacaatattgataaagccaagaagttcatgctgacaggcacctgatatagctgagaggctcagccagagcatgtcaaatacagatatgacgctagcagcaaaccattgaactgagaacagggtccccattggaggaattagaaaaggactgaaggagctgaaggggcttgaaatctcataataacaacaatactaaccaaacagagctgccagggactaaaccactacccaaagactacacatagacagaccctatggytccagctgcatatgtagcagaggatggccttgttgggcaccaatgggaggagaaacccataatccatccaatattgtagtcccagtgttgggaaatgtcagggaggagggggcacacccttatagaagaaggggaggagaatgggatagggggcttatgaccaggaaactgggtaaaggaataacaattgaaatgtaaagaaagagnacccccccccaaaaaaagaaaagaagaagctcaaaaatttagtcagcactaattaccatgaggtatgaaagatactcactaacataaaaggccaaaaatacagctgttgaagataaatctgtatntgagccagttgtgcttccattataaagttggaggcttctgctgcagtttctcctgcagttgttctgactgcctcaaaatcccagttgcctgcacttgccaatactttacatatgtcttccattttccgacatctccttntcctttacacagaacccgcgtactttgcgttgttaccactgctt

SEQ ID NO: 13 - DNA, 860 bp, Rattus norvegicus
actcactatagggctcgagcggccgcccgggcaggtaaattgagcctgacttaagaaatgcttactttaccactgcactgacaaccacaatcatttggtcatggtcaggtgattgccatgtgtctcttttctatttcatatatgaaggaatgttgacaacatctaatgtgttaactctagccaagccaagtgcctattcattgttgaataatactgtgggcttttaagaattaaacagtaaaagacttcaacaagcatgaaaataatacgtgcttaaataaacttaaattctggaaaagaaaaatattttcagagatcagtacatcatccacaatcattgttattttcacaaatagataaaatttctagaataaattcaaagttttatttgggtggaagtaaattttgggctgtaactagaataagagaattacctaaggctcagaagttatgcaagattgatctaaaataatctagatatgaaagatctgcaagtacatgatgaagcctttgttaattcatttgctgtaacataaagaaatacaattccaaggctaaactgaattccatacaccacacagtattatagaaccaaagaaacttctcagattccatagaatcaaaggaaaagaaaaaatacagaatacaatattcaaacatgcagttctaagtgttgtgattttgcccaaaaatgtggggtttttttgctgcattgatgaattggctcatatcatcctatagccataagagaagagaagagaagagatgctttctagcaaaacctaatactgttgctgaatcaaaatgtattctgtacattaggcctaggacattgaaacaacatacagttgcatcaagca

SEQ ID NO: 14 - DNA, 1348 bp, Rattus norvegicus
  misc_feature (153)..(153): n is a, c, g, or t
  misc_feature (1251)..(1251): n is a, c, g, or t
  misc_feature (1266)..(1266): n is a, c, g, or t
  misc_feature (1285)..(1286): n is a, c, g, or t
  misc_feature (1292)..(1292): n is a, c, g, or t
tgacagtggcacacaaaagtacagattcctttcttatgccatggagggcgggccccagcctctgctgcttctgccatgatccagccatgcagccctgccaggacctgccctcacatccgttgtttctggtagcctttgaaatcaggagcttcncatgataatctgaccttctaagataccaaaggtcactttccaggaagcttttctgagaaatgagtaaatgtttcctggtggttttaaatttccaagtgaggaacgtcattcttgtcccagttcagcgactagtggtaacctccacatgccagaaagcagccacactgttgctttcagagcaccagaaattactgagtaaatgctaagtatttatcttctgggaagcaaaggaattgaaagaatatgttaatttttaaaattatatgaatatgctttcagttcttcataggggattgaaaaagaatcttcgacttcatatggaaacacaaaaatctcagcatagctgaacagtcttgaatagtaagtgaactgatttcatgttgtaatgcgaatctgtatattgggcgggggagaacacgctgcagaactgacagcaactttaatgtctggtcatgctggatggggtggctgcatgtagagcattgcaaatgatccatagctatcaccctgcccaaaattcaattccagatggattaagggccttaaaataagaccatataccctgaatctgatagaaaatagggaatgggtctgaacttactggcaccagaaaggaatttccggaaaggaagaggacacatagccctggtgctaaaacccaacaataaatgggaccggatgaagctaaagtttctgtggagcaaaagacaccatgtagtgaatgtttttcatgattttgcgttgggatctaggcatgtgacatttgaaatgttccttggtataattatctggtcttgtccttggtcaagggttctttggttggtactgcccgctctgggtctgggccagttgtgattcctggtagaagtgtctgtgggcaggcaggtgtcacaaaggagttgagatgggctttaaggaaaagccaaagggagtaatagtactaaggggagcctagttctgcaccgagacagaatccctggtggatggtggtccaaatgagaaggggggctcctgtgggcgtgctgcagcaggactaaaggtgaattaaactgaccaaatgcaaaactctgccttttgggatgggttcagtgtaaccanttgcctccaactccngccactgtgcatcccctgnnatgatnaactgccacctggagctgtgaaatcaaaataaatgcttccttccccaaaaaaaaaa

SEQ ID NO: 15 - DNA, 1949 bp, Rattus norvegicus
tgacagtggcacacaaaagtacagattcctttcttatgccatggagggcgggccccagcctctgctgcttctgccatgatccagccatgcagccctgccaggacctggccctcacatccgttgtttctggtagcctttgaaatcaggagcttccacatgataatctgaccttctaagataccaaaggtcactttccaggaagcttttctgagaaatgagtaaatgtttcctggtggttttaaatttccaagtgaggaacgtcattcttgtcccagttcagcgactagtggtaacctccacatgccagaaagcagccacactgttgctttcagagcaccagaaattactgagtaaatgctaagtatttatcttctgggaagcaaaggaattgaaagaatatgttaatttttaaaattatatgaatatgctttcagttcttcatagggattgaaaaagaatcttcgacttcatatggaaacacaaaaatctcagcatagctgaacagtcttgaatagtaagtgaactgatttcatgttgtaatgcgaatctgtatattgggcgggggagaacacgctgcagaactgacagcaactttaatgtctggtcatgctggatggggtggctgcatgtagagcattgcaaatgatccatagctatcaccctgcccaaaattcaattccagatggattaagggccttaaaataagaccatataccctgaatctgatagaaaatagggaatgggtctgaacttactggcaccagaaaggaatttccggaaaggaagaggacacatagccctggtgctaaaaccaacaataaatgggaccggatgaagctaaagtttctgtggagcaaaagacaccatgtagtgaatgtttttcatgattttgcgttgggatctaggcatgtgacatttgaaatgttccttggtataattatctggtcttgtccttggtcaagggttctttggttggtactgcccgctctgggtctgggccagttgtgattcctggtagaagtgtctgtgggcaggcaggtgtcacaaaggagttgagatgggctttaaggaaaagccaaagggagtaatagtactaaggggagcctagttctgcaccgagacagaatccctggtggatggtggtccaaatgagaaggggggctcctgtgggcgtgctgcagcaggactaaaggtgaattagaactgaccagagtgcagagctctgccttttgggatgggttcagtgtaaccagttgcctccaactccagccactgtgcatcccctgccatgatgaactgccacctggagctgtgaaatcaaaataaatgcttccttccctaagttgcttttgtcattttgtcacagcaacagaaaatcatcataataatcagtgctaagtgtggacacatgctgatgggctgagctctcaggaaactaaggcgggaccagctctgtgggaggcatcttaaaccatatagtaaggccttgcctcaagccagtggatcggtagaagacttggggggtatgtaccactccttggcatatacccaaaggttgcagtttcttgcacagaggtggttactcagctggctccgttgtcgctctagccacaaagctaggaaatgggagcagcctaagtggtactcagctgatgcctgcataatgaaatgcatatacacacaatgtaatactgttcagctctaacagtgaggttcacaggtaaatgaatgaatggaactgggtaaggcaccatgttctctcttatttgtggatccgagctccagacctccaaagtgagtataaaaccaaagtaacctcaggagccatgtggaggaaggagttcacaagggggatgatgggacaggtgctatgaaggaagagacgggaaaactgggggagaggttagaaacggaggaaggaaacataacactaagaatgtttgtaaaag

SEQ ID NO: 16 - DNA, 923 bp, Rattus norvegicus
  misc_feature (658)..(658): n is a, c, g, or t
tggattggtctggtgtatggaagtgtggacagcatcttcctgctctccagcgaatggttttcttggctaagaattttgtgcccttattttatagacatgtttttatattttttgactatgtacaaagggattagacaggtcaagtgataaccatgtttatgtgatctacttttgaatattataattttaaatagtgctacaaatggaaatttggtctagaagtattttcaaatgtaaaataaaaatttcatatttaggattagcttttttaactttattttgtaacttttttttctttttttgaggtgtgtgttatgtgaccaaggctggcttagagctcacagtgcccccttttactttcagtgctgtggttatggatgaaccccagacatagactatcacacctgacttaataatttgtaaatatttggggcccatgattttattttttaagataggtctcaaggaggctggagagatggctcagaggttaagaccattggttgctcttccagaggaccatggtttaattcccagcacccacatggtagctcacacctgtctgtaactccagttccagggcttctgacaccctcacacagacattcatgcaggcaaaatatcaatgaacattttaaaaggatgggtctcacaccgnaatgaagacactggcttgaaactcatcatgtagtctagatctggcacagttcaccctctcaggtgctgggattgcagtgccccacatctggctctagggattggattgttttagggcctatggtgttcacagggcctaggttatttgtgttaaaaaaaaaaaaaaaaaaaaagcggccgctgaattctagacctgcccgggcggccgctcgagccctatagtgagtcgtattaggaaggggttatcacttgacctgtctaatccc

SEQ ID NO: 17 - DNA, 741 bp, Rattus norvegicus
cttaaattaaaaaatcatataaatgaaaagagggatcctcagattcctttgaataggtggaggaatatctaatttccctgtgtgcagaagaggaatttttgctgtccctccaggaaaaggtgatagatttttgatgttttaaagtataagggtgaaataggatctcccctggactgtatggaatgtgaatagcttctcttcctcttatgtctggagtactattgagcagaagttgaaggttgattgataccttggaaattatagaacattccagccacacactacttcagcaactccaaactgaaaatcacagtaaagaatacmccctgaatatccatggtaggcagtcaacagtcttagaagtcttgtacgaggctctaatgcagtagtcttaggttcagtatcttattcaaatatatgtccatctacacattcctctgcatgtgaaaggacacctctgtgtaagggaacacaatgaagatagtagtctgatttgtgctggcttttagactcttgtttgagaactctgtccagatttctctgagatctcttcgtcagaacagtgkwtctcagrmcaataaacttakawattktagagaggaaatgsatttkgcatatggggraatstgtsgtaattccttggccttctggagtcctcctaattgtaaaagtctaaatcttacttggtaagatggtggaggtagggaacttgcacagaaagtaggagtgttgtgtcagatc

SEQ ID NO: 18 - DNA, 109 bp, Rattus norvegicus
  misc_feature (60)..(60): n is a, c, g, or t
  misc_feature (64)..(64): n is a, c, g, or t
tggattggtcagaacaaagcagttaaagtctacagattagtgactcgtaactcctatganaganagatgtttgaccgagccagcttgaaactgggcacaaaaaaaaaaa

SEQ ID NO: 19 - DNA, 531 bp, Rattus norvegicus
  misc_feature (14)..(14): n is a, c, g, or t
  misc_feature (32)..(32): n is a, c, g, or t
  misc_feature (51)..(51): n is a, c, g, or t
  misc_feature (93)..(93): n is a, c, g, or t
tcataggtggcaanccatatcctcattaaatncaataatccaggtggcagnaggggtcagtggatgagatgtttgctgccaagttttgcagcntgagtttagtcctcagggcccacacgagaggagagcactctctctaaaggtgtcctctgacctctgtctgtgatccttgtcacatccttgtccacacacattcacacagaaaaataaatgcattgattaacttaatctaaatcataatgacccataaggaatctgtaagtacagtcttaaaatctaatttactgccaattgtggcattattcctccttcaaatcaaaaaattcccatgtactttcttgctctctcaagttcactatcaatgaatttttggaagatcgtctataacttttccttttctgtaggctcaagctcgttgccacwggattggtcagaacaaagcagttaaagtctacagattagtgactcgtaactcctatgagagagagatgtttgaccgagccagcttgaaactgggcacaaaaaaaaaaa

SEQ ID NO: 20 - DNA, 829 bp, Rattus norvegicus
  misc_feature (787)..(787): n is a, c, g, or t
gttttattcatcccccagtgttctctgttgtcttcctccctcgttggcccctttcttcttccaaccagacccctctatctttagttctttctgttttgtttttagtgatacaataaatttaatgggtgaggagtgatctacaggatcataagcaacttatcagtagctataccagagaagaaaatgtttcctcctccctcagcaaccttaacttgcttataatcttcaggcaggagtggagcctctgtgaattgcttcaagcagcttggtttgcctgtagatccttggggagggctgcagccatattagctcctcccccttccttgagtaaatgttaatggggtctgttgtatgtaatgagtcttctgcactaactgtacccactctgcactcaaaagtgcatcaccatgtcaagcacagcagacagtgtctgcaccactgtgttctgtccagagttcttagctgcgagcacagcatcaatatctgcagaagttactcattttatctctccattgcactgtacatgccaggccaggtctgtgccgctgagctatgctcctagcccatctactcccttgagatggaggccttaccaggttggcctckaggctgagcttctgtctcagcctcttgagtggttacggcctcaggtctacatccacatggccagcatttctaactgactagctgtgcccttgaggtgagcagaatgggcgagtgctgaggagatagactgcatgtcctgtggactccaggaaagggttggcaggaactcggaatagaccanaaagctccacagcctcctgctcccacctctcacagtgtaatg

SEQ ID NO: 21 - DNA, 1508 bp, Rattus norvegicus
  misc_feature (36)..(36): n is a, c, g, or t
  misc_feature (127)..(127): n is a, c, g, or t
  misc_feature (1009)..(1009): n is a, c, g, or t
  misc_feature (1272)..(1272): n is a, c, g, or t
  misc_feature (1323)..(1323): n is a, c, g, or t
  misc_feature (1339)..(1339): n is a, c, g, or t
aatttgtatgatttaatgattttaagcacaagtacntcgagcacatttaaattttagcaatatgaacatctgactttcagcacattaaatgtccctttcatggggtcttcaggttcaattggtaaanattccttaattttgtaaaaaatgtaattaaagcaggcactaatcatgttttgaggcttttgcggtgaaatttaggatgcaaaagcctgtttacttacttactatcccatcatgaaagcccattggcacaaggcttagaattcttaagaggctggatgggaaaactgctcacaatcctgagccccctaggaaggggtcaggtgagtaacattcaatacctcctcttaacttaagacagctatatttatccctaccatgcaatactgcagattcaagttaaacttatctgttaacagcagtctgctgtttcctgctccgagatgaaatgaagcaactcttctgcttatgaagagaaacctgtctgaggcaaacgaaagattggcatactgcaccgcctctcaagccactcgatcccactcctctcagtaagctcagcttctttttactccaggattaatgtagaatttttacttcattttattctgcttttgtaaaagcagttgagatgaacgtttgatcttcactggttttcatcaattctttacttttgtggataaagcttggtaagccattaacttttaaaggtagatttccataacttttaaaggtagatttccataactttatactggttgctctcatttgcttaattattgcatatgcagacttcatcagcagtaagactctcaggctcctgctcattccccatggagacatgacattatcttttctgcctttacttatcactcattcaccaaggagctgttccctctgcatctaggtcatcacactgccaggctggttatgactcagatggtgttatctgaaaaaggtctacagaaaaaaaaggtttcccctccctcatcaacaaaagcccaccctntaaaagacattcaggctgaactaccacaattcttacattataaattgcaaatacaaagtatacaatatacaaaaaataagcataccttacatcttgtttagtcacaaggaaactcatttctcctacactaggaaagacttgcttatacaaaactgagatggaatctcttagttgataatataaaagctatcaccagaagaatcccttcagkgtyakycwwgccacttcctttgctctgaagttcctatagtagttattaaganacattaagtcacctgaaaaaaaatttcaaaagagaaccacacactacaatntatatccggtagcttntagagaatccccacactgtaacttccacaccactttagtgatcagaccaacccccaaaccctacacactttcacgggaacagacgactgttgcgatttactttccttgcccacaatattggattagtgggaacacccaaggcaatcttccttactgcccaaaaaaaaaa

SEQ ID NO: 22 - DNA, 4662 bp, Homo sapiens
gccggggaggcattgaggcagccagggcaggggcttctgctgagggggcaggcggagcttgaggaaaccgcagataagttttttttctctttgaaagatagagattaatacaactacttaaaaaatatagtcaataggttactaagatattgcttagcgttaagtttttaacgtaattttaatagcttaagattttaagagaaaatatgaagacttagaagagtagcatgaggaaggaaaagataaaaggtttctaaaacatgacggaggttgagatgaagcttcttcatggagtaaaaaatgtatttaaaagaaaattgagagaaaggactacagagccccgaattaataccaatagaagggcaatgcttttagattaaaatgaaggtgacttaaacagcttaaagtttagtttaaaagttgtaggtgattaaaataatttgaaggcgatcttttaaaaagagattaaaccgaaggtgattaaaagaccttgaaatccatgacgcagggagaattgcgtcatttaaagcctagttaacgcatttactaaacgcagacgaaaatggaaagattaattgggagtggtaggatgaaacaatttggagaagatagaagtttgaagtggaaaactggaagacagaagtacgggaaggcgaagaaaagaatagagaagatagggaaattagaagataaaaacatacttttagaagaaaaaagataaatttaaacctgaaaagtaggaagcagaagaaaaaagacaagctaggaaacaaaaagctaagggcaaaatgtacaaacttagaagaaaattggaagatagaaacaagatagaaaatgaaaatattgtcaagagtttcagatagaaaatgaaaaacaagctaagacaagtattggagaagtatagaagatagaaaattataaagccaaaaattggataaaatagcactgaaaaaatgaggaaattattggtaaccaatttattttaaaagcccatgcaatttaatttctggtggtgcagaagttagaaggtaaagcttgagaagatgagggtgtttacgtagaccagaaccaatttagaagaatacttgaagctagaaggggaagttggttaaaaatcacatcaaaaagctactaaaaggactggtgtaatttaaaaaaaaactaaggcagaaggcttttggaagagttagaagaatttggaaggccttaaatatagtagcttagtttgaaaaatgtgaaggactttcgtaacggaagtaattcaagatcaagagtaattaccaacttaatgtttttgcattggactttgagttaagattatttttttaaatcctgaggactagcattaattgacagctgacccaggtgctacacagaagtggattcagtgaatctaggaagacagcagcagacaggattccaggaaccagtgtttgatgaagctaggactgaggagcaagcgagcaagcagcagttcgtggtgaagataggaaaagagtccaggagccagtgcgatttggtgaaggaagctaggaagaaggaaggagcgctaacgatttggtggtgaagctaggaaaaaggattccaggaaggagcgagtgcaatttggtgatgaaggtagcaggcggcttggcttggcaaccacacggaggaggcgagcaggcgttgtgcgtagaggatcctagaccagcatgccagtgtgccaaggccacagggaaagcgagtggttggtaaaaatccgtgaggtcggcaatatgttgtttttctggaacttacttatggtaaccttttatttattttctaatataatgggggagtttcgtactgaggtgtaaagggatttatatggggacgtaggccgatttccgggtgttgtaggtttctctttttcaggcttatactcatgaatcttgtctgaagcttttgagggcagactgccaagtcctggagaaatagtagatggcaagtttgtgggttttttttttttacacgaatttgaggaaaaccaaatgaatttgatagccaaattgagacaatttcagcaaatctgtaagcagtttgtatgtttagttggggtaatgaagtatttcagttttgtgaatagatgacctgtttttacttcctcaccctgaattcgttttgtaaatgtagagtttggatgtgtaactgaggcgggggggagttttcagtatttttttttgtgggggtgggggcaaaatatgttttcagttctttttcccttaggtctgtctagaatcctaaaggcaaatgactcaaggtgtaacagaaaacaagaaaatccaatatcaggataatcagaccaccacaggtttacagtttatagaaactagagcagttctcacgttgaggtctgtggaagagatgtccattggagaaatggctggtagttactcttttttccccccacccccttaatcagactttaaaagtgcttaaccccttaaacttgttattttttacttgaagcattttgggatggtcttaacagggaagagagagggtgggggagaaaatgtttttttctaagattttccacagatgctatagtactattgacaaactgggttagagaaggagtgtaccgctgtgctgttggcacgaacaccttcagggactggagctgcttttatccttggaagagtattcccagttgaagctgaaaagtacagcacagtgcagctttggttcatattcagtcatctcaggagaacttcagaagagcttgagtaggccaaatgttgaagttaagttttccaataatgtgacttcttaaaagttttattaaaggggaggggcaaatattggcaattagttggcagtggcctgttacggttgggattggtggggtgggtttaggtaattgtttagtttatgattgcagataaactcatgccagagaacttaaagtcttagaatggaaaaagtaaagaaatatcaacttccaagttggcaagtaactcccaatgatttagtttttttccccccagtttgaattgggaagctgggggaagttaaatatgagccactgggtgtaccagtgcattaatttgggcaaggaaagtgtcataatttgatactgtatctgttttccttcaaagtatagagcttttggggaaggaaagtattgaactgggggttggtctggcctactgggctgacattaactacaattatgggaaatgcaaaagttgtttggatatggtagtgtgtggttctcttttggaatttttttcaggtgatttaataataatttaaaactactatagaaactgcagagcaaaggaagtggcttaatgatcctgaagggatttcttctgatggtagcttttgtattatcaagtaagattctattttcagttgtgtgtaagcaagtttttttttagtgtaggagaaatacttttccattgtttaactgcaaaacaagatgttaaggtatgcttcaaaaattttgtaaattgtttattttaaacttatctgtttgtaaattgtaactgattaagaattgtgatagttcagcttgaatgtctcttagagggtgggcttttgttgatgagggaggggaaactttttttttttctatagacttttttcagataacatcttctgagtcataaccagcctggcagtatgatggcctagatgcagagaaaacagctccttggtgaattgataagtaaaggcagaaaagattatatgtcatacctccattggggaataagcataaccctgagattcttactactgatgagaacattatctgcatatgccaaaaaaattttaagcaaatgaaagctaccaatttaaagttacggaatctaccattttaaagttaattgcttgtcaagctataaccacaaaaataatgaattgatgagaaatacaatgaagaggcaatgtccatctcaaaatactgcttttacaaaagcagaataaaagcgaaaagaaatgaaaatgttacactacattaatcctggaataaaagaagccgaaataaatgagagatgagttgggatcaagtggattgaggaggctgtgctgtgtgccaatgtttcgtttgcctcagacaggtatctcttcgttatcagaagagttgcttcatttcatctgggagcagaaaacagcaggcagctgttaacagataagtttaacttgcatctgcagtattgcatgttagggataagtgcttatttttaagagctgtggagttcttaaatatcaaccatggcactttctcctgaccccttccctaggggatttcaggattgagaaatttttccatcgagcctttttaaaattgtaggacttgttcctgtgggcttcagtgatgggatagtacacttcactcagaggcatttgcatctttaaataatttcttaaaagcctctaaagtgatcagtgccttgatgccaactaaggaaatttgtttagcattgaatctctgaaggctctatgaaaggaatagcatgatgtgctgttagaatcagatgttactgctaaaatttacatgttgtgatgtaaattgtgtagaaaaccattaaatcattcaaaataataaactatttttattagagaatgtatacttttagaaagctgtctccttatttaaataaaatagtgtttgtctgtaaaaaaaaaaaaaaa

SEQ ID NO: 23 - DNA, 2210 bp, Mus musculus
aacttatggatcaggccaaattggccgagttcgaattttttgagttaattaaattcatccccccccccccccgaggcattcaggcagcgagagcagagcagcgtagagcagcacagctgagctcgtgaggcaggagactcagcccgaggaaatcgcagataagtttttaattaaaaagattgagcagtaaaaagaattagaactctaaacttaagctaatagagtagcttatcgaaatattacttagtcttaataatctaagaagatcttaagagataacatgaaggcttatttaaacagtttgaaaaaggaaatgaggagaaaagtatttgtactgtataatggaggctgaccagagcagtttaggagattgtaaagggaggttttgtgaagttctaaaaggttctagtttgaaggtcggccttgtagattaaaacgaaggttacctaaatagaatctaagtggcatttaaaacagtaaagttgtagagaatagtttgaaaatgaggtgtagttttaaaagattgagaaaagtaggttaagttgacggccgttataaaaatccttcgactggcgcatgtacgtttgaaggcatgagttggaaacagggaagatggaagtgttaggctagccgggcgatggtggcgcacgcctttaatcctagcacttgggaggcagaggcaggcggatttctgagttcgaggccagcctggtctacagagtgagttccaggacagccagggctacacagagaaaccctgtcttgaaaaaacaaaaaggttaggctagtatttggagaaagaagattagaaaatggaagtgaaagacgaagaagacatacaggaaggtgaagaaaaagctgttagagaagataggaaaatagaagacaaagcatctttagaagacagaaaaggtacttaaaggcacaggtagtaggaagccgaagaatagaagatagaaagaagcaagatagaaaaacaaaatggaagttaagacaactttggatgccagcattcaagataggcaaagaagataagattgaggccaaaaggttggataagatataaagtcagaaggaaattatctttaaagccataagttcaaatttctgatggagcgagcagtttagaagagtctttagacagccacatacaagattgaagctagcaatcaaagctactaggactgaagtaaaaagttaaggcagaatgcctttgaagagttagaagaatattaaaagccttaacttgtagcttaattttgcttgatgacaaaaggacttttgataacagtttcaagattgtcagcattttgcattggacttgagctgaggtgcttttaaaatcctaacgactagcattggcagctgacccaggtctacacagaagtgcattcagtgaactaggaagacaggagcggcagacaggagtcccgaagccagtttggtgaagctaggaaggactgaggagccagcagcagcagtgcatggtgaagatagcccaggaaagagtgcggttcggtggaggaagctaggaagaaggagccatacggatgtggtggtgaagctgggaaagggttccaggatggtggagcgagagcgagttggtgatgaagctagctggcggcttggcttgtcaactgcgcggaggaggcgagcaggcattgtggagaggatagatagcggctcctagaccagcatgccagtgtgcaagaaaggctgcagggagagcatgcggtgcggtaacattccttgaggtcggcaacatggtggtggttttctgtaacttggatggtaacttgtttactttgtcttaatagttatgggggagttgtaggcttctgtgtaaagagatatatctggggctgtatgtaggcctttgcgggtgttgtaggtttttctttttcagggttatgtcctcttgcatcttgtcagaagcttttgagggctgactgccaaggcccagaaagaagaatggtagatggcaagttgtctttaaccgctcagaggggaatgaatggtagagccagcacaacctcccagttttgtaagacgttgtagtttgaacagatgacctaccacaagcctcactcctgtgtaggggaggtaattgggcaaagtgcttttgggggaatgggggcaaaatatattttgagttcttttccccttaggtctgtctagaatcctaaaggcagatgactcaagggaaccag

SEQ ID NO: 24 - DNA, 2168 bp, Mus musculus
ggaaaaaaggaaatccactctcaggataagcagagctcgccaggtttacagtttgtaggaagtagaggatggatgctagctttcacactgagtgtggaggagctggccatggcggaattgctggtagtttactctttccccctcccttaatgagatttgtaaaatcctaaacacttttacttgaaatatttgggagtggtcttaacagggaggagtgggtgggggaaacgttttttttctaagattttccacagatgctatagttgtgttgacacactgggttagagaaggcgtgtactgctatgctgttggcacgacaccttcagggactggagctgccttttgtccttggaagagttttcccagttgccgctgaagtcagcacagtgcggctttggttcacagtcacctcaggagaacctcaggagcttggctaggccagaggttgaagttaagttttacagcaccgtgatttaaaatatttcattaaaggggaggggtaaaacttagttggctgtggcgttgtgtttgggtgggtgggggtgttaggtaattgtttagtttatgatttcagataatcataccagagaacttaaatatttggaaaaacaggaaatctcagctttcaagttggcaagtaactcccaatccagtttttgcttcttttttcctttttctttttttgaggcgggcagctaaggaaggttggttcctctgccggtccctcgaaagcgtagggcttgggggttggtctggtccactgggatgatgtgatgctacagtggggactcttctgaagctgttggatgaatatagattgtagtgtgtggttctcttttgaaatttttttcaggtgacttaatgtatcttaataactactataggaacaaaggaagtggctttaatgaccctgaaggaatttcttctggtgatagcttttatattatcaagtaagagatactatctcagttttgtataagcaagtctttttcctagtgtaggagaaatgattttccttgtgactaaacaagatgtaaaggtatgctttttttcttcttgtgcattgtatacttgtgtttatttgtaacttataatttaagaattatgataattcagcctgaatgtcttttagagggtgggcttttgttgatgagggaggggaaacctttttttttctgtagacctttttcagataacaccatctgagtcataaccagcctggcagtgtgatgacgtagatgcagagggagcagctccttggtgaatgagtgataagtaaaggcagaaaaaataatgtcatgtctccatggggaatgagcatgagccagagattgttcctactgatgaaaagctgcatatgcaaaaatttaagcaaatgaaagcaaccagtataaagttatggcaatacctttaaaagttatggcttatctaccaagctttatccacaaaagtaaagaattgatgaaaaacagtgaagatcaaatgttcatctcaaaactgcttttacaaaagcagaatagaaatgaagtgaaaatgctgcattaagcctggagtaaaaagaagctgagcttgttgagatgagtgggatcgagcggctgcgaggcggtgcagtgtgccaatgtttcgtttgcctcagacaggtttctcttcataagcagaagagttgcttcattccatctcggagcaggaaacagcagactgctgttgacagataagtgtaacttggatctgcagtattgcatgttagggatagataagtgccttttttctctttttccaaaaagacctgtagagctgttgaatgtttgcagctggcccctcttaggcagttcagaattttgagtagttttcccatccagcctcttaaaaattcctaagccttgcaccgatgggctttcatgatgggatagctaataggcttttgcatcgtaaacttcaacacaaaagcctacatgattaatgcctactttaattacattgcttacaagattaaggaatctttatcttgaagaccccatgaaagggatcattatgtgctgaaaattagatgttcatattgctaaaatttaaatgtgctccaatgtacttgtgcttaaaatcattaaattatacaaattaataaaatacttcactagagaatgtatgtatttagaagcaaggatccgaat

SEQ ID NO: 25 - DNA, 1995 bp, Rattus norvegicus
agcgagcacaggcgcctggtgaggcaggagactcagcctgaggcattcgcagataagtttctatttaaaaagatttaaaaggaaactagaactctaaacttaatagagtagcttactgagataataatattttaatattaagattttaaaaggaaagtatggaggtttatttaaacaatttgaaaaaggaaaagagaaaaatttttgtaccaccagatggaggctgacctgaggcgtttattcagagtaggttagaagattgtaaaagggagcaattgtggagtttcaaaggttctagcttgagggtcagccttgttaggtgtacttttaaacgaaggttacctaaacagaatctaaatggctttttaaaattgtaaagttgtagataatagtttgaaaatgagatgtagtttaaaaagattgaaaaaagtaagttgaagggccgttataagagtcgactgtcgcatgtacgaaggcatgagttggaaacggggaatggaagtggtagggttagtattttgagaaagaagattagaaaatggaagtggaaaaatgaagacaagttcaggaaggtgaagaaaagctgtagagaagataggaaaatagaagaccgaagaatcattagaagacagaaaaggtatttaaacacacaggtaggaagaaaactagaagatagaaaaaaagcaagatagaaagacaaaaggaaaaaaaaaagaacaaaaaaagcaagatagaaagacaaaaggaagttcagacaactttggatgccagcattcaagataggcaaagaagataagatcaagaccaaaaggttggataaggttaaatctcagaaataaagtcagaaggaaattatttttaaagccataaattcaagtttctgatggagcccagcagtttagaagtgtctgtagacagccattttacaagagtgaagctagcagtcaaagctacaactgaagtaattaaaaaggcagaatgcgtttgaaaagttagaagaatattagaagccttaacttgtagcttaattttgttttgagaacaaaaggacttttgataacaatttcaagattgtcagcattttgcattggacttgagctgaggtgctttaaaagtgttaacgactagcattggcagccgaccaaggtctacacagaagtggattcagtgaacctagaaagacaggagtcccgaagccagtttggtgaagctaggaaggactgagcagccagcagcagcaggtcatggtgaagatagcccaggaaacagtgcggttcgttggaggaagctaggaagaaggagccgaaatgatgtggtgaagctagaaaagaggattccgggaaggtggagccagttcgagttggtgatgaagctagctggcgtcttggcttgtcaacgcggaggaggcgagcaggcattgcgttgtggagagaatagatagcggctcctagaccagcatgtcaatgtgcaagaaaggctgcagggaaagcatgtggtgcggtaacatcccgtgaggtcggcaacgcggtggtggtttctgtaacttgaggatggtaacttgtttattttgccttggtatgggggagtttgtaggcttctgtctgtgaagagagtcatctggggctgtaggccgctgcgggtgttggaggtttttctttttcagggttgtgtcctcttgcatcttgtctgaagcttttgagggcagactgccaaggcccagaagaatggtagatggcaagttgtcttaacccgatctgagggaaaatgaatggtagagccaacagtctcgccagttttgtaagacgttttagttctgtgaacagctaacctactgcagtcttctgcaagtcttactactgtgtaggggaggtaattgggcaaagtgcttggggggtggggtgggacaaaatatattttgagttcttttccccttaggtctgtctagaatcctaaaggcagatgactcaagggaaccaggaaaaaaaaaaaaaaaaa

SEQ ID NO: 26 - DNA, 1996 bp, Rattus norvegicus
  misc_feature (223)..(578): n is a, c, g, or t
  misc_feature (629)..(629): n is a, c, g, or t
  misc_feature (893)..(893): n is a, c, g, or t
gaagattttccacagatgctatagttctgttggcacactgggttagagaaggcgtgtactgctatgctgttggcacgacaccttcagggactggagctgccctttatccttggaagagtttccccagtggccgctgaagtacagcacagtgcagctttggttcacagtcacctcaggagaacctcaggagcttgagtaggccagatgttaaagttaagttttnnnnnnnnnnnnnnnnnnnnnnnnnnnnnnnnnnnnnnnnnnnnnnnnnnnnnnnnnnnnnnnnnnnnnnnnnnnnnnnnnnnnnnnnnnnnnnnnnnnnnnnnnnnnnnnnnnnnnnnnnnnnnnnnnnnnnnnnnnnnnnnnnnnnnnnnnnnnnnnnnnnnnnnnnnnnnnnnnnnnnnnnnnnnnnnnnnnnnnnnnnnnnnnnnnnnnnnnnnnnnnnnnnnnnnnnnnnnnnnnnnnnnnnnnnnnnnnnnnnnnnnnnnnnnnnnnnnnnnnnnnnnnnnnnnnnnnnnnnnnnnnnnnnnnnnnnnnnnnnnnnnnnnnnnnnnnnnnnnnnnnnnnnnnnnnnnnnnattgtagtgtgtggttctcttttgaaattttttttcaggtgacttaatgtntcttaataactactataggaacttcagagcaaaggaagtggcwwgrmtgaccctgaagggatttcttctggtgatagcttttatattatcaagtaagagattccatctcagttttgtataagcaagtctttcctagtgtaggagaaatgagtttccttgtgactaaacaagatgtaaggtatgcttattttttgtatattgtatactttgtatttgcaatttataatgtaagaattgtggtagttcagcctgaatgtcttttanagggtgggcttttgttgatgagggaggggaaaccttttttttctgtagacctttttcagataacaccatctgagtcataaccagcctggcagtgtgatgacctagatgcagagggaacagctccttggtgaatgagtgataagtaaaggcagaaaagataatgtcatgtctccatggggaatgagcaggagcctgagagtcttactgctgatgaagtctgcatatgcaataattaagcaaatgagagcaaccagtataaagttatggaaatctacctttaaaagttatggaaatctacctttaaaagttaatggcttaccaagctttatccacaaaagtaaagaattgatgaaaaccagtgaagatcaaacgttcatctcaactgcttttacaaaagcagaataaaatgaagtaaaaattctacattaatcctggagtaaaaagaagctgagcttactgagaggagtgggatcgagtggcttgagaggcggtgcagtatgccaatctttcgtttgcctcagacaggtttctcttcataagcagaagagttgcttcatttcatctcggagcaggaaacagcagactgctgttaacagataagtttaacttgaatctgcagtattgcatggtagggataaatatagctgtcttaagttaagaggaggtattgaatgttactcacctgaccccttcctagggggctcaggattgtgagcagttttcccatccagcctcttaagaattctaagccttgtgccaatgggctttcatgatgggatagtaagtaagtaaacaggcttttgcatcctaaatttcaccgcaaaagcctcaaaacatgattagtgcctgctttaattacattttttacaaaattaaggaatctttaccaattgaacctgaagaccccatgaaagggacatttaatgtgctgaaagtcagatgttcatattgctaaaatttaaatgtgctcgatgtacttgtgcttaaaatcattaaatcatacaaattaataaaatacttcactagagaatgtatgtatttagaaggctgtctccttatttaaataaagttttgtttgttgtctgtaaaaaaaaaaaaaaaaa

SEQ ID NO: 27 - DNA, 1339 bp, Rattus norvegicus
  misc_feature (338)..(338): n is a, c, g, or t
ttttttttttttttttttttatatacttatatattatatatttgtgttattatgttatataataataaattaattacatatattatatatattaacaatcaattacaaagacaggtatataggaggacttggaagacagaaagggaaagggaaaataatatatctcaraaaataaaaaataaaaattttaaactatataaatgaggggagtgatgcctaatatggagtctttwgtcgctgggcgatgcgttggaccctcctgtgagacctcagcctcctcctcctttctttgctccattggccactacaagcccagagctgcaatgccaaccaagatntccaagactgcgagccaacatacacttttcctctttgcaaactggcttcataaggtgacagaaaactgatggatactttctaagtctcagtaagaatgaagaaaatggtgagcagggccaagcacctgcctagcatgcgtggggttccaagttcaagccctggcacagcaagaaaatcgaagcacagtttctgatctgccttgcagcaatgagaccctcayttcaaggccttgccctgtagccttaagagaagaacaatgaaggatccaccatggcccagcatggacgttgttcagtcacattttcactgatgttcatggtttcttcatacccatgtaatgagaccttcataaagtcaaatggggcagtgtatagagaccatctaggggttcctgatggggttctcaaagagagcgtgagagtgcagcaacccttctcccagaccttaactgctttatctgtatcctttaaaataaaagttgtagttctcggttgtgtgaaccatttcggcaaactgacggaacccgagtgggcgagagcagtggagatcagttatttgcaagaacttgagctttcctatgcccgcctttgctttgaataatgacatggagaccctttatatttataataaattccaggcagtaagatgggcaaactctgagctactctaacccgactgctgccctggcctgcttcccagcggtgtagcccttttcctgacatctcagcctctctctggcacctcctccttcatttgtgtcctgacagagatggtgactccctggatctcatgtaagaccctctctctcctcatccaggcatggctgtccggccttatgctctcttgggagctataggctattcagctctttatataaccaatcagaaggcgatggggaacaatgctttacaaaatactgagtcataccaaggtccagactgcatccaggtctctgggtacaggaatcagcctatgaatacaccatgcacaaaaaaaaaaa

SEQ ID NO: 28 - DNA, 177 bp, Rattus norvegicus
  misc_feature (29)..(29): n is a, c, g, or t
ggaaccaatttcatagtaacacaaacttntcgataaccttaaacgtgacatttgtgctagtgttttacactatgggtgataaaagtttagaatctcagatttcatctttaaagaactaaaagcaacccttgcttcaagtgtcacttctgcaattgtacggaccacaaaaaaaaaaaa

SEQ ID NO: 29 - DNA, 1102 bp, Rattus norvegicus
  misc_feature (175)..(175): n is a, c, g, or t
  misc_feature (177)..(177): n is a, c, g, or t
  misc_feature (197)..(197): n is a, c, g, or t
  misc_feature (202)..(202): n is a, c, g, or t
  misc_feature (233)..(233): n is a, c, g, or t
  misc_feature (316)..(316): n is a, c, g, or t
  misc_feature (377)..(377): n is a, c, g, or t
  misc_feature (381)..(381): n is a, c, g, or t
  misc_feature (413)..(413): n is a, c, g, or t
  misc_feature (443)..(443): n is a, c, g, or t
  misc_feature (448)..(449): n is a, c, g, or t
  misc_feature (467)..(467): n is a, c, g, or t
  misc_feature (537)..(537): n is a, c, g, or t
  misc_feature (582)..(582): n is a, c, g, or t
  misc_feature (612)..(612): n is a, c, g, or t
  misc_feature (647)..(647): n is a, c, g, or t
  misc_feature (716)..(716): n is a, c, g, or t
  misc_feature (990)..(990): n is a, c, g, or t
  misc_feature (1073)..(1073): n is a, c, g, or t
  misc_feature (1075)..(1075): n is a, c, g, or t
ctgacagtaattctttaaatggtgtaatttattcatttaaagcatgtcaagataaattaaaagaacatttgtctgaaaatgctgccaggagcctattgtgtaactgtaggtattttgtataataatcctgaattgtaaattgacccatgtttggtaagattgtgtcagaattgantngtagagtttttttttttttngaacngcaataattaattccatgattgccacattcngtcaccatgagatgtgttattaccataaggctgaaataatcttaggaggtggatttgatggtggggtggcagctacatgtttntttcccaaccatgcttgacagttaaagtatttgtgttttgaatacataaaccctttgatanttcntagccggaaatcagtttcataaagctattttngactatagtttgtgtaaaataaaagtgttnggctnnggcaacagctttccaagntgagctccctttcgagcaagatatttttcagtgcttttatttactatgcacttagactatgcactttttntgaaatatttttgtaacacttttttgtatttttgccatttgaaanggctgtggtgtcattggtctctcattaagntgcaggttcgaaaccgctgttagctttgtgaatcngaatctagagatgtgtccgtcctgtgatgttgtcgtcccatcttcacctggagctggaatccattgatnttctagctaccattcattttcttcacagttcacaaagaagagtgtgaaattcagtgaatgcagttactaacctgtctggaaatgaatctcatttcaccaaatcaattgtttttccactaaaatgatggtgtatgttgaagacatcactgagatcggaagacctcaccactaatggctccacagtggctggctcagctgaactttaggtttccacttcttcctttgttcacccattgggtgatgcagctttttaactgttgggagatgaccattntaactactgttgagtgtttctgttttgggaaggtaaaataagaaaataaaaaggaatatatatgaagggagaggctggttgtntntcccgtgtggttgtacaaaaaaaaaaa

SEQ ID NO: 30 - DNA, 478 bp, Rattus norvegicus
  misc_feature (46)..(46): n is a, c, g, or t
  misc_feature (197)..(197): n is a, c, g, or t
  misc_feature (263)..(263): n is a, c, g, or t
gtcagtatggaaaaattggtgcaggggtaaaggctagggaaaaacntctctaagcccagcctggactgtcttgtcacctgctacagcctcggggacccctaaacacgtagcctacaacacgtattacttatcacagaagctttcatccacggacataccacaggtgtctgtgatttaaaaactaccatttttataantgcccctggaggtgatattttcctctgtgcaaagggctctgaggtctgggtgggttaagccatgtntttaaggtggggcagctgctcttccacagactggagacctaagaccaggtctctttgcttacagtaggtaggcactttgcaatgataccgagctgcctttctgtggcaactcagttaatgaaataaccatgaattaatcctgtagcttttcgggtcttatatcaactatctccagtcacacacagacacacacagacacacacakacactcacac

SEQ ID NO: 31 - DNA, 964 bp, Rattus norvegicus
  misc_feature (46)..(46): n is a, c, g, or t
  misc_feature (908)..(908): n is a, c, g, or t
gtcagtatggaaaaattggtgcaggggtaaaggctagggaaaaacntctctaagcccagcctggactgtcttgtcacctgctacagcctcggggacccctaaacacgtagcctacaacacgtattacttatcacagaagctttcatccacggacataccacaggtgtctgtgatttaagaactaccatttttataagtgcccctggaggtgatattttcctctgtgcaaagggctctgaggtctgggtgggttaagccatgtgtttaaggtggggcagctgctcttccacagactggagacctaagaccaggtctctttgcttacagtaggtaggcactttgcaatgataccgagctgcctttctgtggcaactcagttaatgaaataaccatgagttagtcctgtagcttttcgggtcttatatcaactatctccagtcacacacagacacacacagacacacacagacacacacacacagacacacacactcacatacagacacacacagacacacacactcacacacacacacactcacacatacaccactacacacaaagacatgtatacatttcacttatgaatgcatatttaatcacacagtgtccacccttcccccctctacccccacacacaaccattcacccagttattcacacatcggcccacccatctatgtatccatctcccagcccatctatgtatccatctccctgcccatctatgtatccatctccctgcccatctatgtatccatctccctgcccgtccctgcccactcatctgctcctccatccacctgtgcgtctggccacccactacccatctagtcatctaccttcccatccatctacccacccacctgttcacatacccatcttcccactcatcctgcatctaatanacgctttcaggattccctctgtgccccagggacactattaagtcctgtgcatgtgt

SEQ ID NO: 32 - DNA, 616 bp, Rattus norvegicus
  misc_feature (616)..(616): n is a, c, g, or t
tttttttttttgtggaaagaaaacatcagaaacctttgaggtcccaaatgccattcatcggagggagggaagcacatgccaacgacagggctccatgtacactccgcgtctctgaaacaggacatcttccagcttcctcaccaaagaggtgcgtcctctcagcttgacccccaacccccaccctggagccaaatcacagagagacatagagacagagacagacagacagggggagagagagagagagagagagagagagagagagagagaaacytctttcccactgttaacttgatctattgggcagagtctcagagaaaagccaagtcagctgagtttcaggcaaagactgagaaaatgtgggcacctgaaggtaaattaaatatttataaagacaacaacatcatcacagatagaaatgctgatttattaataattcctacwagaagccagagagagtcactagcgtaagtcattgccccatctcttaggcatgacatggcccattacttccagatccaaacagatttgctaacatgaaattggctgggattgtgarttaattaaggttgggttggtacacatttcccttgatcttggtgggcaatgtkacacn

SEQ ID NO: 33 - DNA, 945 bp, Rattus norvegicus
  misc_feature (56)..(56): n is a, c, g, or t
  misc_feature (629)..(629): n is a, c, g, or t
  misc_feature (718)..(718): n is a, c, g, or t
  misc_feature (738)..(738): n is a, c, g, or t
gtccttataagagttgccttggtcatggcatctgttcacagtagtaaaaccctaantaagacgactatgatcacacacgtctccacggtgtggcagatcctatttccaccgtaactgacccctgtctcttctttctccctgaaggggatgaggacgattgttggcacaggggtcagatccactatgtccaagatcgagatgttcctggcctctgggcagacagcctgctctactctgagaggcttggagcagcactggctgcagcaggagctgaaagggagctccacccccatgctctgcatttccttgacagtccacagcagcaatctctgtgtcacattgccaccaagatcaagggaaatgtgtaccaacccaaccttaattaactcacaatcccagccaatttcatgttagcagatctgtttggatctggaagtaatgggccatgtcatgcctaagagatggggcaatgacttacgctagtgactctctctggcttcttgtaggaattattaataaatcagcatttctatctgtgatgatgttgttgtctttataaatatttaatttaccttcaggtgcccacattttctcagtctttgcctgaaactcagctgacttggcttttntctgagactctgcccaatagatcaagttaacagtgggaaagaggtttctctctctctctctctctctctctctctctctctctcccccngtctgtctgtctctgtctcnatgtctctctgtgatttggctccagggtgggggttgggggtcaagctgagaggacgcacctctttggtgaggaagctggaagatgtcctgtttcagagacgcggagtgtacatggagccctgtcgttggcatgtgcttccctccctccgatgaatggcatttgggacctcaaaggtttctgatgttttctttccacaaaaaaaaaaa

SEQ ID NO: 34 - DNA, 236 bp, Rattus norvegicus
  misc_feature (30)..(30): n is a, c, g, or t
  misc_feature (32)..(32): n is a, c, g, or t
  misc_feature (38)..(38): n is a, c, g, or t
  misc_feature (40)..(40): n is a, c, g, or t
  misc_feature (95)..(95): n is a, c, g, or t
  misc_feature (126)..(126): n is a, c, g, or t
  misc_feature (128)..(128): n is a, c, g, or t
  misc_feature (188)..(188): n is a, c, g, or t
  misc_feature (207)..(207): n is a, c, g, or t
ttggtaaaggggcagaagggtaaagggtananatggananatacaattaatactaaagtcctttgaaaaagctatatgcatattcacaattgtanaaacttcatttaaaaatatgtatgtatcaanantacaaacatagtttttctatgcattgaaaaaaatgtctctcttgtattggacatttgcanaaaaaaaatgtctggtcanaagtgctgttacgccacaaaaaaaaaaaa

SEQ ID NO: 35 - DNA, 1497 bp, Rattus norvegicus
  misc_feature (912)..(912): n is a, c, g, or t
  misc_feature (963)..(963): n is a, c, g, or t
  misc_feature (1074)..(1074): n is a, c, g, or t
  misc_feature (1172)..(1172): n is a, c, g, or t
  misc_feature (1185)..(1185): n is a, c, g, or t
  misc_feature (1198)..(1198): n is a, c, g, or t
tctcagcatagctgaacagtcttgaatagtaagtgaactgatttcatgttgtaatgcgaatctgtatattgggcgggggagaacacgctgcagaactgacagcaactttaatgtctggtcatgctggatggggtggctgcatgtagagcattgcaaatgatccatagctatcaccctgcccaaaattcaattccagatggattaagggccttaaaataagaccatataccctgaatctgatagaaaatagggaatgggtctgaacttactggcaccagaaaggaatttccggaaaggaagaggacacatagccctggtgctaaaacccaacaataaatgggaccggatgaagctaaagtttctgtggagcaaaagacaccatgtagtgaatgtttttcatgattttgcgttgggatctaggcatgtgacatttgaaatgttccttggtataattatctggtcttgtccttggtcaagggttctttggttggtactgcccgctctgggtctgggccagttgtgattcctggtagaagtgtctgtgggcaggcaggtgtcacaaaggagttgagatgggctttaaggaaaagccaaagggagtaatagtactaaggggagcctagttctgcaccgagacagaatccctggtggatggtggtccaaatgagaaggggggctcctgtgggcgtgctgcagcaggactaaaggtgaattagaactgaccagagtgcagagctctgccttttgggatgggttcagtgtaaccagttgcctccaactccagccactgtgcatcccctgccatgatgaactgccacctggagctgtgaaatcaaaataaatgcttccttccctaagttgcttttgtcattttgycmsmscamcagaaawtcatcataataatccagtgcntaagtgkgrmcmcatgctgatgggctgagctctcaggaaaytwaggcgggnaccagctctgtgggaggcatcttaaaccatatagtaaggccttgcctcaagccagtggatcggtagaagacttggggggtatkkwccactcctttggcatataccccaaanggttgcaagtttctttgcacaagaaggtgggttacctcarctggcttccgttgkccgsttctarcccacaaaagcttagggaaaatggggaagccagncctaartgggtanctcarcttgatgnccctgcattaatggaaaatggcatwtmcacacaatgtaatactgttcagctctaacagtgaggttcacaggtaaatgaatgaatggaactgggtaaggcaccatgttctctcttatttgtggatccgagctccagacctccaaagtgagtataaaaccaaagtaacctcaggagccatgtggaggaaggagttcacaagggggatgatgggacaggtgctatgaaggaagagacgggaaaactgggggagaggttagaaacggaggaaggaaacataacactaagaatgtttgtaaaag

SEQ ID NO: 36 - DNA, 2964 bp, Homo sapiens
ttgggctgttttaagtgcaagagctgtgggaagctcctgaatgccgagtacatcagcaaggatgggctgccctactgcgaagctgactatcacgccaagttcggcatccgctgtgacagctgtgagaaatacatcacggggcgcgtgctggaggccggagagaagcactaccacccttcctgcgcgctatgtgtcaggtgcggccagatgtttgcagaaggcgaagagatgtatcttcaaggttcctccatctggcatccggcgtgtcgacaagcagccagaactgaagacagaaacaaggaaaccagaacttcctcagagagcatcatttctgtccctgcttccagcacctcagggtctccgagccgtgtgatttatgccaagcttggtggtgagatcctggactacagggacttggcagcccttcctaaaagtaaggccatctatgacatcgaccgccccgacatgatctcctactcaccctacatcagccactctgcaggggacaggcagagctacggcgagtcccctcagttgctctcgccaacgccgaccgagggggatcaggatgaccggtcctacaagcagtgccggacctccagcccaagctccactgggtcggttagcctcgggcgctacactccgacctcacggtcaccacagcactacagccgtccagctggtactgtgagtgtgggtaccagtagctgcctctccctgtcccaacacccaagccctacatccgtgttcagacatcattacatcccctacttccgaggcagtgaaagtggccggagcacccccagcctctccgtgctctctgacagcaagccgcccccctccacctaccagcaggcacctcgccacttccacgtcccagctgccaggcgatcggatggggaggatggaagcttggaccaggataacaggaagaagagcagctggctgatgctcaagggggatgcagacacaaggaccaattctccagacctggacacccagtccttgtcccacagcagcgggaccgacagagaccctctccaaaggatggcaggggacagctttcactcacatctatccgtatgactccctcatcgtcacaaaccgaattcgcgtgaaactgcccaaagacgtggaccggacgagactggagagacacttgtcgcccgaggagttccaggaagtgtttgggatgagcatcgaggagtttgaccgcctggccctctggaagaggaatgaccttaagaagaaagcccttttgttctgacggctgccagcctgccccactggtgtgtgccgggcgccgaggccaggggcccctggcgagaaccgcacacacccctcccacacaccttgctctggcttctctgtgtccatggggtgggcgggagggggtcccccagcaggtgcggcccctgcacctgccggcgacactcctgccggtagtttagggccgagacggctagcttcacgccacccttccccgctgtggcttggtgtcagggagaggctgtagagtggctgtgtcgggcatcagatggagcacacaggtggctgcagcccagcccaccttcccagcgttctcgaggtgccctggccccggtgctgggcacgtgggggacagaggtggccgggacgtgagctgtgaggcttgttgatgatggttgctgacaccatcatcgggggtgggcacacggcccttcggagcctgggcagcctggcctcacaggcagactcgcagacggggcagtgagcgtctgggacagtgccaagagtggggtgtgtgatttttgcaggcgtctgtgatgggtctctttagggacaaatgtcaacaagggacaagacagggcaccttccgccagcgcccctccatgcgctgcgttcctcctccagatcgacccctagatgcctacacaatatctttaaagtaacacagaagtttttattttattaaaaagtatagcctacttaaacgcgagatgacatatatagagtttaattttacggtccctccgcaggggagcggcctccagccttattctccaccgctcggatctgtgtggtttcagtctgttcttggtgtggtcctcatacacagagctccctgtctagtttcttttctttttcttttttctttttctcgtcacacaggtaaccttaaagacagacccctctaaagaacgctttgtaaatacatgtgaggtatagccaccactgttttccttgctgttatttttccaagtcttggggagaaaacatcctcctctgatggccaaagccctggaatcaagggtttccacgtaccctgcctaatacccgacgtagctcttgatgcaccgtccttgtgctgtggctggcggtgtctcagcctgaaacataaaccccacatgccccaggagcgatgtgctccctgaaacagacaaccacacgctgttggggagagaaggatggagataggatggagataggatggagatgtggctcttctcatctttgaagccagcagggcatcccggagcaggaggctggccgggctccccaagcgaaggcgttggtgtctgtcattaggtgtgtgttagggtgcagcaccggccgtcacaggatgctgataagcgcgctgagaggtggatgaaacaccaaagtctgtttccccgtccgcagtgggtgttgcctctttgtgtgtgtcccgatgttcctgcctgtgagtcggccttactccgtttccttagcgcccatgacacgccaagtcccgtttcgcactcggcttctcacccgcccagctcggctagggagggggagtttttagcacctaatatgcttcctgccattgcgcaatctgagcctgagcaactggaaacccccatttctcattagtgcaatgtcatatctgatcccaggaagcctggaaaataaaagacgatgcattataacttgcggaagtacaagaaaaaaaaaaaaaaaaaa

SEQ ID NO: 37 - DNA, 2351 bp, Mus musculus
  misc_feature (357)..(606): n is a, c, g, or t
cgggtgctagaggccggagagaagcactaccacccttcatgtgcgctatgcgtcaggtgcggccagatgttctcagagggcgaggagatgtacctgcaaggctcctccatctggcatccggcatgtcgacaggcagccaggactgaagacaagagcaaggaaaccaggacttcttcggagagcattgtctccgtgcctgcctccagcacgtcagggtccccgagccgtgtgatctacgcaaagcttggcgatgagatcctggactacagggacttggctgctcttcccaaaaacaaagcgatctacaacatcgaccgccccgacatgatctcctattcgccctacattagccactcnnnnnnnnnnnnnnnnnnnnnnnnnnnnnnnnnnnnnnnnnnnnnnnnnnnnnnnnnnnnnnnnnnnnnnnnnnnnnnnnnnnnnnnnnnnnnnnnnnnnnnnnnnnnnnnnnnnnnnnnnnnnnnnnnnnnnnnnnnnnnnnnnnnnnnnnnnnnnnnnnnnnnnnnnnnnnnnnnnnnnnnnnnnnnnnnnnnnnnnnnnnnnnnnnnnnnnnnnnnnnnnnnnnnnnnnnnnnnnnnnnnnnnnnnnaaacagcacgctgccaggcgattggacgtggaggacagcagcttcgaccaggacagcaggaagaagacaacctggctgcttctcaagggggatgcagacaccagaactaactctccagacctggacagtcagtcgctgtccctcagcagcgggactgaccaggaacctctccaaaggatggcaggggacagcctctactcacagtataagatatatccctatgattccctcatcgtaacaaaccgaattcgtgtgaaactgcccaaagacgtggaccggacacggctggagagacacctatcacctgaggagttccaagaagtgtttgggatgagcatcgaggagtttgaccgcctggccctgtggaagaggaatgacctcaagaagaaagccttgctgttctgacagctgccaacatcttaccaggagcctgctgggggggcagggctgaaggaccccaccagtcccctgaaaatcccctcctgcaccttgctctgcttctctgtgtcagtagggcaggcagggtgcctgcaggaggcagggtggggccaggccctgaggagcatccagcaggcatggtcccttgtatagcaaggatgctcttgcctgtagtttagggccaggtgccagcttgacccactccttcccgccacaactgggcatcagggcagtgttgcagccagctatcctaggagatagggacagagcagtcagccagcccagcacctttccggggcacctggtgtgcccacacctgtgctaggcactggggcacagagtgtctgggacgtgagtgaaagacttgtcaggggcagactctgacacagcaggaatggtaagtgtgagacttctcggagcgtgaggaggtaccaagtagccttgcagactgaggcaggggagccaggccaaagtctgcgaggcagtgggacggaggttttctacagttattgtgatagatcttttatggggaatgaatgttgacctgacagggtgccccccgctaatgctctgtgtattgtgcccctcttccagatcacccccttagttgcctaaatgatatctttcaagttacacagaagtttttattttattaaaaagtatcgcttccttacacatatgaagacatatatgcagagtttagttttacggtccctgagaaggggaccgctccggcttacacctccccacccatcccaccgtgcaggcctctgtgcttccagtcctccgcggctcctcacagacaggagccggtctgtttcccttcgtccctgctcctttgtatgtgtcacgtgacacagccattgactgcagcggcagagatggacagctagaggtggtgcctcctccaacctgggtgtctagaagtgggggctaactggggccctggtagcgggtatggaagagcacccctgtgcagaatgggtggacactgtggtcctgggtgactctagctgtccctcctccgggttgccgtcactattctcacatcccgggacatgtgtgagtctcatctgtgctggggttctcacagcctggtgggcgggagggaacttgggtacttatctggttctgcattagagtctgtaacggaaatggaaaccactctccatcctgagggtgtaggtggccgggaccggaaacacgggccgggcacaacaaacacaacacaacacagagaacagcacaaaacaaaaaaaggggggtaaggcgcccatgagcaaaaaagggggagggacgtaacattt

SEQ ID NO: 38 - DNA, 712 bp, Rattus norvegicus
  misc_feature (319)..(319): n is a, c, g, or t
  misc_feature (453)..(453): n is a, c, g, or t
  misc_feature (496)..(496): n is a, c, g, or t
tggggcacagagtgtctgggatgtgagtgaaaggcttgtcagtggcagaccctgacacagtagtaatggtaagtgcgagactcctcagtgcacgaggaggcatcgggcagactggcaggctgaggcaggggagccaggccagtgtttgagaggcagtggggctgtgttttttgcagttattgtgatggatcttttctggggaatgaatgtcgacctgacagggtgccccccactagtgctgtgcatttgtattgtgccctttttccggatcacccccttagttgcctaaatgatatctttcaagttacacagaagtttntatttatttaaaaagtatcgcttccttacacataagaagacatatatgcagagtttagttttacggtccccgagaaggggagcgcctccgccttacacccccaccaacccccgcccgcccatcatgcaggcctntgtgcttccagtcctcggcgttcctcacagacaagagccagtntgtttccctccgcccctgctcctttgtatgtgtcacacagacagcctcaaagacactggctcagcagtgcagtttgtaaatacatgtgaaatgtatccatcttttcccctctctgtcattttcccaagtcccaaagagaagagcgccccctgatggccaaagccctagaataaaggtttccccactgtggcctagtctcaaaaaaaaaaaaaaaaa

SEQ ID NO: 39 - DNA, 197 bp, Rattus norvegicus
  misc_feature (104)..(104): n is a, c, g, or t
ttttttttttttgtgtaaggaagcgatactttttaataaaataaaaacttctgtgtaacttgaaaaatatcatttaggcaactaagggggtgatccggaaaaanggcacaatacaaatgcacagcactagtggggggcaccctgtcaggtcgacattcattccccagaaaagatccatcacaataactgcgaaaaca

SEQ ID NO: 40 - DNA, 947 bp, Rattus norvegicus
ggaacagaagtcatagggtccatggctccagcatggacttccttcaggcaggatagagggttcgctgcagatgagctctttttgcctgaaaccttctgctttgcttctctgcctctcacatgctgtctctgcccttccacctggaggcagcgaaagtggccgtagcactccaagtctctcagtgcactccgacagcaggcctccttcctctacctatcagcaggctccgagacacttccacgtcccagccgccaggcgactggacgtggaggacagcagtttcgaccaggatagcaggaagaagacaacgtggctgctcctcaagggagatgcagacaccagaactaactctccggacttggacagtcagtctctgtccctcagcagtgggggaggagcatccagcaggcatggtcccttgtgtagcaaggatgctcctgcctgtagtttagggccacgtgccagcttgacccactccttcccgccacagctgggcatcggggcagtgttgcagctatcctaggagacggggcagagcattcagccagcccagcaccttcccagggcacctggtgtgctcacacctgtgctaggcactggggcacagagtgtctgggatgtgagtgaaaggcttgtcagtggcagaccctgacacagtagtaatggtaagtgcaagactcctcagtgcacgaggaggcatcgggcagactggcaggctgaggcaggggagccaggccagtgtctgagaggcagtggggctgtgtttttcgcagttattgtgatggatcttttctggggaatgaatgtcgacctgacagggtgccccccactagtgctgtgcatttgtattgtgccctttttccggatcacccccttagttgcctaaatgatatttttcaagttacacagaagtttttattttattaaaaagtatcgcttccttacac

SEQ ID NO: 41 - DNA, 2818 bp, Rattus norvegicus
  misc_feature (109)..(109): n is a, c, g, or t
  misc_feature (111)..(111): n is a, c, g, or t
  misc_feature (2589)..(2589): n is a, c, g, or t
  misc_feature (2629)..(2629): n is a, c, g, or t
  misc_feature (2636)..(2636): n is a, c, g, or t
  misc_feature (2652)..(2652): n is a, c, g, or t
  misc_feature (2668)..(2668): n is a, c, g, or t
  misc_feature (2676)..(2676): n is a, c, g, or t
  misc_feature (2681)..(2681): n is a, c, g, or t
  misc_feature (2739)..(2739): n is a, c, g, or t
  misc_feature (2760)..(2760): n is a, c, g, or t
  misc_feature (2788)..(2788): n is a, c, g, or t
  misc_feature (2795)..(2795): n is a, c, g, or t
cccccgcttccctaagatctgtgccggtgtctctgtttacaataaaccccttcctgagccagctcctgggtggacttcccctggaagaggagtcagccccacaaaggananaatcccgctttcatgccttttcgttcatctggctagatagagttctagaattcagcggccgctgaattctagaactctatctagccagatgaacgaaaaggcatgaaagcgggattctctcctttgtggggctgactcctcttccaggggaagtccacccaggagctggctcaggaaggggtttattgtaaacagagacaccggcacagatcttagggaagcgggggatccttcagaaatcattgctgtctggctttggaatgtattgattttgctcctagacagttcgcctccctaactcctctcggcttaagtaagcaatacaaaacctgtttgcctgttttgatctcatctcagctggtggcaaggggcaagggcctcacaggctcccatgctgtctggaggaagggaccgggtttacaactcatctgcagagagccacaaacacagaaactgcttgtcctggggaactgggtcagccctggagaacatgagtgttttcgacagagtagacaccagcaagaggtccgggcttccgaaaagactttctacttgacattagggaacagagtctcacttccgtggctccccaccttcactccctacttccttacaggtgtgaacctgaagcagaagcatcagtccccttagctggcataaagatgggggctattcattctgtctaggcagctgttgcaaagtttgtgacatactgggtccagagtgacagctcagttaagtttcgcagacagagcctggaatggtagactcggacaacggtgaaacagcaataatgttgaaaacagaggccactgacaaacaaccaaacatgaccaggtgagctgttcactcaggatcacccaggatgctagtggcttattctgaacgcctttctgttgcctctctgagaactgtgccctcctggagatcacacctgctttttgcacattcttccttctcattttgccaaccatcgagctgtggtgtagaaagccatgcatgcctctgtgaacctctgttcgtgcaaacgccatgtgtgggtgccaagaaatggcactccacctacaggacatgcccctctggaaggcggggggggggggggtatggagccaggaggccacaggttacctgtcatccttactttaaacaccaatccgatgttctgttggatgaggccacggaagcctgggctcttcatctacaaaactggagtggggtggaccaagtgaggctggtgaaactctgtgatgctatgaaatgaccctcaatactgtggccactgggcttctgttttgactctataatctgagcatccctttagactggctgtagatataatagaatttgtactttctccaaaattaaattactggcagtaaacgatcaatcaatccattgattaactacttattgatctgctgctgacgtggctctgagacagtttggctgtacttgggaacacaatcctttggtaattggcttatcatgctgggtgcacagcctctgttaaaaggcatctgggtcttggtaaatggctttttatctgtgttatttatgtgtccaacattttatgtgtgtgccgagttcagaggtaagcccacatgctaccacagactcagccagggaaatccagtacaatgggtccaagcacttaattcattaatttatttttgagacagccacgtgtagcccagggtggctttaaactcacaatgtagcagaggctggctttgaactttttatcctcccgattctaattcccatgctagaattagaggcttttgccaccacacccagctaactgagggtactggagaagtcactttacttcttgtctcagctgccaccccccaaaaaaacaaaggttgtggctccacagcctttaaggggctcacattccttacctcagattttggctttctctccccacagtctcacttaaggagatgggatatttccatatcaaaagctacttcaggctcaggttggcaaggctaggtccctggggaaaccgtggactatattgatactttgaagtgttgacattaagggcatcccctatactgggcacaggccatagggaatcaccctgccccattcccaaatgataaacacggaggaaggaatttgggccacaattcttccctgcaaacatcctctgtgttactacccttctgtcacattggcatgtcaggaaaacaagctcattcactagtgacatctgcagaatcaccccagaagactgcccccttgtgagctctaaagggtgacggagcttggaagacctatggtgttggactgtctgtgtcagacatccatcttgggggcaaaggagttaggaaccacatgctacctgagcacagaaatgcaactttcctcctgtcctgtagcgtargcaggtgtacctcttattggatgatcaacagtggcctcagcctgtagccttgtggaccctttctgtccccctctatagggtanccatacctccctctgaaggttgaatccaaatatgtctcantccttgnttcaaaacttacccangggagtccacactccngtctatancgctntgaccatcctacagccatccccattgtccaccccactycwgttytgyasmyraaggtngtcgtggggtaaacacatcantgaatgaatgagtttggatctgaatganaaagganaactaatttcccatcctacatta

SEQ ID NO: 42 - DNA, 4672 bp, Rattus norvegicus
gaactctatctagccagatgaacgaaaaggcatgaaagcgggattctctcctttgtggggctgactcctcttccaggggaagtccacccaggagctggctcaggaaggggtttattgtaaacagagacaccggcacagatcttagggaagcgggggatccttcagaaatcattgctgtctggctttggaatgtattgattttgctcctagacagttcgcctccctaactcctctcggcttaagtaagcaatacaaaacctgtttgcctgttttgatctcatctcagctggtggcaaggggcaagggcctcacaggctcccatgctgtctggaggaagggaccgggtttacaactcatctgcagagagccacaaacacagaaactgcttgtcctggggaactgggtcagccctggagaacatgagtgttttcgacagagtagacaccagcaagaggtccgggcttccgaaaagactttctacttgacattagggaacagagtctcacttccgtggctccccaccttcactccctacttccttacaggtgtgaacctgaagcagaagcatcagtccccttagctggcataaagatgggggctattcattctgtctaggcagctgttgcaaagtttgtgacatactgggtccagagtgacagctcagttaagtttcgcagacagagcctggaatggtagactcggacaacggtgaaacagcaataatgttgaaaacagaggccactgacaaacaaccaaacatgaccaggtgagctgttcactcaggatcacccaggatgctagtggcttattctgaacgcctttctgttgcctctctgagaactgtgccctcctggagatcacacctgctttttgcacattcttccttctcattttgccaaccatcgagctgtggtgtagaaagccatgcatgcctctgtgaacctctgttcgtgcaaacgccatgtgtgggtgccaagaaatggcactccacctacaggacatgcccctctggaaggcggggggggggggggtatggagccaggaggccacaggttacctgtcatccttactttaaacaccaatccgatgttctgttggatgaggccacggaagcctgggctcttcatctacaaaactggagtggggtggaccaagtgaggctggtgaaactctgtgatgctatgaaatgaccctcaatactgtggccactgggcttctgttttgactctataatctgagcatccctttagactggctgtagatataatagaatttgtactttctccaaaattaaattactggcagtaaacgatcaatcaatccattgattaactacttattgatctgctgctgacgtggctctgagacagtttggctgtacttgggaacacaatcctttggtaattggcttatcatgctgggtgcacagcctctgttaaaaggcatctgggtcttggtaaatggctttttatctgtgttatttatgtgtccaacattttatgtgtgtgccgagttcagaggtaagcccacatgctaccacagactcagccagggaaatccagtacaatgggtccaagcacttaattcattaatttatttttgagacagccacgtgtagcccagggtggctttaaactcacaatgtagcagaggctggctttgaactttttatcctcccgattctaattcccatgctagaattagaggcttttgccaccacacccagctaactgagggtactggagaagtcactttacttcttgtctcagctgccaccccccaaaaaaacaaaggttgtggctccacagcctttaaggggctcacattccttacctcagattttggctttctctccccacagtctcacttaaggagatgggatatttccatatcaaaagctacttcaggctcaggttggcaaggctaggtccctggggaaaccgtggactatattgatactttgaagtgttgacattaagggcatcccctatactgggcacaggccatagggaatcaccctgccccattcccaaatgataaacacggaggaaggaatttgggccacaattcttccctgcaaacatcctctgtgttactacccttctgtcacattggcatgtcaggaaaacaagctcattcactagtgacatctgcagaatcaccccagaagactgcccccttgtgagctctaaagggtgacggagcttggaagacctatggtgttggactgtctgtgtcagacatccatcttgggggcaaaggagttaggaaccacatgctacctgagcacagaaatgcaactttcctcctgtcctgtagcgtaggcaggtgtacctcttattggatgatcaacagtggcctcagcctgtagccttgtggaccctttctgtccccctctatagggtagccatacctccctctgaaggttgaatccaaatatgtctcactccttgtttcaaaacttacccagggagtccacactccaggctataatgcttgaccagcctacagccatccccattgtcctccagttctgttctgcacccaaaggttgtcgtggggtaaacacatcaatgaatgaatgagtttggatctgaatgacaaaggagaactaagttccatcctacataatttaaacgcatacaagagggtctggggagatggcttagtcaataaagtacatgctgcacacgcgtgggtaccggaatcagaatcccgtaaaagctacctcataaaagctggggaggcagagacaccgaaggaccccagggcttactggtcagatgaatggatgagctccaggtccattgagagaccctgtcttaaaaactaactcggaaggctcatggctcagtgggtaaaggtacttgccaccaggcctggcaacctgagttcaatgctcagaatgcacacggtggaaggagagaacatactcaggccacagtccacttgtccatgacgctgtcactgcaccagttcctgtttctcaaacaaaccagtgttttaacccaggctcctcgcctgtcccagggtctctgcttgtgttccttgagcctagaaagccctcgtcagtcacctcgtcctgtaaggtctctccgaatcttcagacctagtttcttccctggccagttacagccctggaccagtcttgtccctcttacttcctccctgtcaggcttgcttttgtcaggcttggttttcatcctatccctgaggaggccaccagcccatgagcactaggaaccggtttgtcgtcttctccattctgtccccagggcctgggcagtacttggctctagaatgggattagatggctattgaaggaatgaacgacccagcaggtggcacatccttcactctcgctcttgctactcaggcagatgggaacctcagaggcctctccggatcagatgccactgccagcaaaactttgttccccagagccagtgtgaggatcagtcccagcccatctgccctccttgccgcccgcctctgccaggctcccagatcgcagaagccccccattccgtgaggaccagttttttgaggcctgtgtttcacagcaggaagctttttggttttctccttttaagggaaatttttgctctgggactggctgtaattgttgaatttgcatctggtccacctgctgtgacaggccccagggcacttaggcctttgcaaatcaataggaataaacaaacaaatacattccgaggaaaggggtctccagaggaggggtactgaaggggaagggagagagcacagctcgagcacggctcaccagtctgcagttggggacctgcctcctccccaccagacccgactccaggccgcctgctgtgccacaggacccgccttccttcactacagagaaaccaagactataatttcagtgctaggctgaatggcttcatttctttttattaactccagccctggggttttaggcatatcggctgttgtttgtgctatatggatcctctcccctccattctccaggctttgagaatttgaagcagcagaaacagccagcaagagatggcaccaagtggcagaagaggttgcatggagacctagtcaccctgtgcgggagccgaaggagcaggaggagggtggtgaggacaggacgcctagaacccagcgctacctagatacccgcacaggtgccttcccggctcacctgctgctgtcctacaattaggaagaaatctggccagcctcccaggtacccactgagctatagcgtaatgaggcaaaaagcaaccagtgttgacaaggttacctgtgagtcttcatgcacatgccaggttttgtggggagctcaccaggctccagggctccacagctgctggcatggaaggggccgctacagaataaagggctgtactctgggaggcattttacagagtcttgggagccatgacatcatgactaagggcaggctgcaactacaggaggacgggcaccagatcctccgtcttacccttggctccgttcctttcctggcatgtagcaggcatgttgaaggtgtgtgtgtgtgtgtgtgtgtgtgtgtgtgtgtgtgtgtgtgtgtttgtgtgtgtgtgtaatgcacatgtatgtattcatgtgtggatatgtatggaagtcagaagtcgttgttgatggtctttttctaccattcgttgaa

SEQ ID NO: 43 - DNA, 539 bp, Rattus norvegicus
catcaccactaccaccccacttctcttttcctcttctctcctctcctttcttccccaccccaactccctgagcccagactagttccaggttacagggctcaaacaatcttccaacctcaccttctctagcagagataacaactccacaccactgtgcctattgaattttaatccagaatgtctgtattttaatttagatctctctataaagatagcaccttccaatctggtggatgttttggtttgaaggttttgagggaacaggggtgatttgatagatatttaaatggtattctatacaacaagtaagaaaacacacataattctctgtggtccatgaaaccctctgctaaattggacacacctaactaatacaaaatatcaaaataacttcttaaaacataccatacaacaatgaaatataatgcattgaacatcacgaaagaccacaggaactacaaagatacttggagactaagcaatabcttttgagggatggtggaaaggtaaagggggaggggacaatagaatccaagctt

SEQ ID NO: 44 - DNA, 1759 bp, Rattus norvegicus
gtgctctattgactctatcgaagtctgggatgggcaggtatctcgacagctttgagatgtctcacgtataaactgtggtctctttctactaatgtggcatttgatgggagaaggcagaatgggtccttgtgactggcctggctggtgtccagttcccttgtgagcaggccaggcagtagaagcctgggaaggagcagctgactaggagagaagtgaaggttggtggtgagaccctaaggcttcaggtttctggcacatagcatgcagtgcaagattgagaccctgggtcccacatccaacaggagttggagggtgaaggctgacagccattagaggagtaaaaatatgggttaaaaattaattaagttgcggggccaccaaactccattctgcttgaccctgtcacatctgggtgattctgtgttctcacctgctaaaagtggtttaggaggacacagccaagaagcagaagtgtaaacaggtctctaatagccttggaagtaccacccagaacagggcactggctgctaccttggtctttgagcgctagctcctcctccctgaagatacccttcaggtatggtgtctgcctgcctagaggccctatcagacagaggacaaaatctagktcaccagacaggaccstggggttggagatgcagagggttgctgctgagtcctgtgaactggaattgcatgcgtaaccagccgctagagttaacgacttttcagggagctgaggttctctaggcaggaactactyaggtcactctggagtgggaccaatgggggtaggagcacgccctgggtgggggtatgtgccccaggataaaggactgaatgccacaggccgggaggggcggtgcttcttgtgcaccacgtggatctctggagcagtcagcttgtgctctgtttgcggaacgttggtcagtaggaggctccgggtgccggagggtctgtgttcctgggtgctactcctccctgcctgtatccttcgggcgttgaactcgggtgctgcagcagagcaatgaaggatctgcggttcggtgagtgatcctatcagggctgcggtaagcagcaagatctgttttacctggaaaagcttctggtttccgcagggaactgggagttaaacccagagtgagcttagaggaaaggagagggagagaggggatccctgaaagtcaggcgaggaccctcccctacctgaggcgcatcaggcttttcttaataaacgttttatcgtcttgtcacaccttctggtgcttctgttttcctcacacggaacattttgtatttctctttgtccagattgctcattttccggtcaatttaggctgtcttgagatctcttctgccacactattaatccaaaacgcttcaatttaacctcaggtatatattttagacaagggcagaaagcagctgcattcttgccaaaatgtctcaagaatggtcttaaggccactcaccagtatccttcccttctgaaacttgagctgggctctcatggtttctatcgctctcagctgctgtcttccgygctcctactcagatgcacattaaatccccttagagagttcaaacgcttttctagcctgaagttgcagagttcacattcggccgacaacagcatggccaggcctgtcacagcaataccccgttccctggtctcagcttctgtcttagtcactgttctttctattcctgtgaagagacagcatgaccataggaagtctgacaaaagaaagcatttctt

SEQ ID NO: 45 - DNA, 827 bp, Rattus norvegicus
gktttcgcagcttggccatttctgcttctatgttaggactccagtggcataaatgtagatggtttattgtggacctagcaatttattagccttttttttctgttattcggattgtgtaaaatctagtgctctagcaccagattcactaatcctacagttgtatttttcactccagttctagggaatccattgtcttcatccagcctttaagatattatgcaggaggtacatagacatttgtacaggcaaaacatgtgaatgtataagataaaaactttcaaataaatattaaacaaattaaaagtaaatgtatgttccccatgataatgagtataaaagaagctccaagtttgattgactagccttaacatgatttacacacctccagaattcccagggactaaactaccaaccaaagagtacacatgagggacccacgactccaacttcatatgtagcagaggatggcctatctgccatcagtgggaggggaggcccttgatcctgtgagggcttgatgccccagtggaagggaatgctagggtggtgaggcaggagtgtgtgagtgggtgatcagggtgggagagcaccctcagaaacaggggggagagggatgggatagggagtttgcagaggggaaactgggaagggggataacattcgaaatgtaaataaataaaataacccataaaaaaaataaaaaaaaaaaaaaaaaaaaaaaaaaaaaaagcggccgctgaattctacctgcccgggcggccgctcgagccctatagtgagtaagggcgaattccagcacactggcggccgttactagtggatccgag

SEQ ID NO: 46 - DNA, 1081 bp, Rattus norvegicus
  misc_feature (234)..(234): n is a, c, g, or t
  misc_feature (379)..(379): n is a, c, g, or t
actcactatagggctcgagcgggccgcccgggcaggtgtgtcacctgattcttccccccatttcacatatcaaaatatattctcactagtccatcatggattataaaaaagacaggccctcaatggaaatacatagaatatgtttagaaatagatatgctctgaccaattatcacagaacaagtcaaagggtggatttactctttgaggaacactgtatcccagtgtgaaaganagtatcctgtttagaatttgacgctcacagtgttcgggcttgtgactaccgtaaattaaatgaagccacatgcccccagtgcacagagtaggcatccaaaaatagaacgagggaagagagctgatttgaaggagggacgagttantcagaagtggccataagaagccagggagcctgagaagtgccttgggatgtgcaatttcaagatgcaagcaaataacagaagtcccagaacacgctcagttattccggactgagtgtccctcttgttatgtgattatttctggaatttttctccaccggcttcatttacaagggaaagggaaagatgactggagaagaacggaggaagtaaaacttactgagttcagaaaaaattatttctatcccagattctatcatccagagaacagctaataaaaagaaatctctaatagcaaattttccacaatccatcacagccaacagacaattgtaatttagcatgaaggtttttcttgcacagagaactagcaaggctatccatcacctttctgtcagtgacatcataaacaggcccctctctaatatttgttcatcctttgtgatccactgaaataggtataagtatattacttatagaaatacagaagaagcaagtcccactagagtatgaaaggtaaatttcagagagacaattattacacctagaataacatacaaaattatctcttctttctctgaaatgggagaaatcaaattgtacgcttttcaagtagaaggagaacattaacctgacgggccatgtgttaacagtgctacagaatcaaaatgccattgaacacactgtgtccctgcggacttgatc

SEQ ID NO: 47 - DNA, 195 bp, Rattus norvegicus
  misc_feature (9)..(9): n is a, c, g, or t
  misc_feature (16)..(16): n is a, c, g, or t
  misc_feature (26)..(26): n is a, c, g, or t
  misc_feature (28)..(28): n is a, c, g, or t
  misc_feature (69)..(69): n is a, c, g, or t
  misc_feature (75)..(75): n is a, c, g, or t
  misc_feature (105)..(105): n is a, c, g, or t
ggtactaangcaaaanttggtactananagtggactattgcagtgagagacctgactgaaccaacttangagaanaaagagtttactttgggctcacagtttcanagggtgagtccatctcaatagttccttgtgttgctcctaggaaacttcctgtgtgtaaattcttaaattttgctgaaaaaaaaaaaaagg

SEQ ID NO: 48 - DNA, 538 bp, Rattus norvegicus
  misc_feature (499)..(499): n is a, c, g, or t
  misc_feature (537)..(537): n is a, c, g, or t
tgacagtggcacacaaaagtacagattcctttcttatgccatggagggcgggccccagcctctgctgcttctgccatgatccagccatgcagccctgccaggacctggccctcacatccgttgtttctggtagcctttgaaatcaggagcttccacatgataatctgaccttctaaaataccaaaggtcactttccaggaagcttttctgaaaaatgagtaaatgtttcctggtggttttaaatttccaagtgaggaacgtcattcttgtcccagttcagcgactagtggtaacctccacatgccagaaagcagccacactgttgctttcagagcaccagaaattactgagtaaatgctaagtatttatcttctgggaagcaaaggaattgaaagaatatgttaatttttaaaattatatgaatatgctttcagttcttcatagggattgaaaaaaaatcttcgacttcatatgggaaacacaaaaatctctagcatanctgaaacartcytkraatagtaarttaactgaataccng

SEQ ID NO: 49 - DNA, 547 bp, Rattus norvegicus
  misc_feature (538)..(538): n is a, c, g, or t
  misc_feature (547)..(547): n is a, c, g, or t
ccccttctcatttggaccaccatccaccagggattctgtctcggtgcaaaactaggctccccttagtactattactccctttggcttttccttaaagcccatctcaactcctttgtgacacctgcctgcccacagacacttctaccaggaatcacaactggcccagacccagagcgggcagtaccaaccaaagaacccttgaccaaggacaagaccagataattataccaaggaacatttcaaatgtcacatgcctagatcccaacgcaaaatcatgaaaaacattcactacatggtgtcttttgctccacaaaaactttagcttcatccggtcccatttattgttggttttagcaccagggctatgtgtcctcttcctttccgggaaattcctttctggtgccagtaagttcagacccattccctattttctatcaaattcagggtatatggtcttattttaaggcccttaatccatctggaattgaattttgggcagggtgataactatgggatcattttgcaatgctctactatnccataacan

SEQ ID NO: 50 - DNA, 250 bp, Rattus norvegicus
tcgatacaggcaaatacagatgataaaatgtaggcaacaactaaattaaccatgttttcttatatctcttcagttctaaggttacctttgtgagttataacagcgcctggatggagactgacacattagcctgaaaagctacaccagtagactgattcaatcaagatatttgtgtattgtgttctatgtccactttctgtcctattcttacacccctgtatctctaaaacactggaagagctagtaaatt

SEQ ID NO: 51 - DNA, 90 bp, Rattus norvegicus
gatcgcattgggtatgtggtatcagtgtaggagacaagaatagcaatgggtacttatttagtgcccttcttcttaatctgtgaccaatcc

SEQ ID NO: 52 - DNA, 559 bp, Rattus norvegicus
  misc_feature (422)..(422): n is a, c, g, or t
  misc_feature (497)..(498): n is a, c, g, or t
  misc_feature (539)..(539): n is a, c, g, or t
gatcgcattgcaccagacaaacttgaacatcccagtgttcataaaaacaaatatcctttttttctaacagaaatcatgtagtagttcgaccaatccagcttcatttggacttcctaagtctaagagttccaaaacagcacmatgggkggacatatcacaatacatttgttgaatggtcctctagagagatgaatggaaaccctgcttcagttttggtaaaaacagatttgaaagatgcttagaaacttacaactatttattcctaagaaacgcttttcttccacagtaatttcatctacatatggaactgtgttataagaagcagctgtgtattctwaataccttggataatttatggaaaaccccaaaggaagtgttctaattacttacaggcatttcttatagtagatattatttaatgnccagagggagtaaatttttaacaagtcaaagtagcttcagtttatattaaggaattattctattcattattaatnnaatactgaggagggcaatggggagatggcaccatgtatganatgattagagggcaagccca

SEQ ID NO: 53 - DNA, 445 bp, Homo sapiens
gatctaaccggcaggcatacgtgcagatagattattgggtatataatatataaatacatctttaaaacaaagcaaaactgcataccaaaactaagtatctccaattacaaagttactcatgaaactgaaaaaaggaaggacacattcagaagacaacacaactgggaaggtaaggagatcacacatcttgagaacattccatttcggttagaacacaagtctaaggtcgccactccctgttcccctgtgacttgtcatggtcaaatccccaccatttcccatcattctcggcacctgtacttgccaaccttggcacattcctgtttcagtcccaacccggttttctcagattacctcacacagggtaccaacgagtcctgtctcccaagcttgccccttatcttccaccaaagcatagggtttgtctgctgtctcctaccgagtg

SEQ ID NO: 54 - DNA, 1773 bp, Homo sapiens
atctcagatcttcactatggcaacttatgcaagaaactgttgaattagacccgtttcctatagatgagaaaccatacaagctgtggtatttatgagcctccatttcttatactactgcagtgaaccaacattggatgtgaaaattgccttttgtcagggattcgataaacaagtggatgtgtcatatattgccaaacattacaacatgagcaaaagcaaagttgacaaccagttctacagtgtggaagtgggagactcaaccttcacagttctcaagcgctaccagaatctaaagcctattggctctggggctcagggcatagtttgtgccgcgtatgatgctgtccttgacagaaatgtggccattaagaagctcagcagaccctttcagaaccaaacacatgccaagagagcgtaccgggagctggtcctcatgaagtgtgtgaaccataaaaacattattagtttattaaatgtcttcacaccccagaaaacgctggaggagttccaagatgtttacttagtaatggaactgatggatgccaacttatgtcaagtgattcagatggaattagaccatgagcgaatgtcttacctgctgtaccaaatgttgtgtggcattaagcacctccattctgctggaattattcacagggatttaaaaccaagtaacattgtagtcaagtctgattgcacattgaaaatcctggactttggactggccaggacagcaggcacaagcttcatgatgactccatatgtggtgacacgttattacagagcccctgaggtcatcctggggatgggctacaaggagaacgtggatatatggtctgtgggatgcattatgggagaaatggttcgccacaaaatcctctttccaggaagggactatattgaccagtggaataaggtaattgaacaactaggaacaccatgtccagaattcatgaagaaattgcaacccacagtaagaaactatgtggagaatcggcccaagtatgcgggactcaccttccccaaactcttcccagattccctcttcccagcggactccgagcacaataaactcaaagccagccaagccagggacttgttgtcaaagatgctagtgattgacccagcaaaaagaatatcagtggacgacgccttacagcatccctacatcaacgtctggtatgacccagccgaagtggaggcgcctccacctcagatatatgacaagcagttggatgaaagagaacacacaattgaagaatggaaagaacttatctacaaggaagtaatgaattcagaagaaaagactaaaaatggtgtagtaaaaggacagccttctccttcagcacaggtgcagcagtgaacagcagtgagagtctccctccatcctcgtctgtcaatgacatctcctccatgtccaccgaccagaccctggcatctgacactgacagcagcctggaagcctcggcaggacccctgggttgttgcaggtgactagccgcctgcctgcgaaacccagcgttcttcaggagatgatgtgatggaacacacacacacgcagacacacacacacacacaaatgcagacacacaacatcaagaaaacagcaagggagagaatccaagcctaaaattaaataaatctttcagcctgcttcttccccagggttctgtattgcagctaagctcaaatgtatatttaacttctagttgctcttgctttggtcttcttccaatgatgcttactacagaaagcaaatcagacacaattagagaa

SEQ ID NO: 55 - protein, 1180 aa, Homo sapiens
METSERLEHISPHELETYRTYRCYSSERGLPRTHRLEASPVALLYSILEALAPHECYSGLNGLYPHEASPLYSGLNVALASPVALSERTYRILEALALYSHISTYRASNMETSERLYSSERLYSVALASPASNGLNPHETYRSERVALGLVALGLYASPSERTHRPHETHRVALLELYSARGTYRGLNASNLELYSPRILEGLYSERGLYALAGLNGLYILEVALCYSALAALATYRASPALAVALLEASPARGASNVALALAILELYSLYSLESERARGPRPHEGLNASNGLNTHRHISALALYSARGALATYRARGGLLEVALLEMETLYSCYSVALASNHISLYSASNILEILESERLELEASNVALPHETHRPRGLNLYSTHRLEGLGLPHEGLNASPVALTYRLEVALMETGLLEMETASPALAASNLECYSGLNVALILEGLNMETGLLEASPHISGLARGMETSERTYRLELETYRGLNMETLECYSGLYILELYSHISLEHISSERALAGLYILEILEHISARGASPLELYSPRSERASNILEVALVALLYSSERASPCYSTHRLELYSILELEASPPHEGLYLEALAARGTHRALAGLYTHRSERPHEMETMETTHRPRTYRVALVALTHRARGTYRTYRARGALAPRGLVALILELEGLYMETGLYTYRLYSGLASNVALASPILETRPSERVALGLYCYSILEMETGLYGLMETVALARGHISLYSILELEPHEPRGLYARGASPTYRILEASPGLNTRPASNLYSVALILEGLGLNLEGLYTHRPRCYSPRGLPHEMETLYSLYSLEGLNPRTHRVALARGASNTYRVALGLASNARGPRLYSTYRALAGLYLETHRPHEPRLYSLEPHEPRASPSERLEPHEPRALAASPSERGLHISASNLYSLELYSALASERGLNALAARGASPLELESERLYSMETLEVALILEASPPRALALYSARGILESERVALASPASPALALEGLNHISPRTYRILEASNVALTRPTYRASPPRALAGLVALGLALAPRPRPRGLNILETYRASPLYSGLNLEASPGLARGGLHISTHRILEGLGLTRPLYSGLLEILETYRLYSGLVALMETASNSERGLGLLYSTHRLYSASNGLYVALVALLYSGLYGLNPRSERPRSERALAGLNVALGLNGLN

SEQ ID NO: 56 - DNA, 1505 bp, Homo sapiens
ttatgcaagaaactgttgaattagacccgtttcctatagatgagaaaccatacaagctgtggtatttatgagcctccatttcttatactactgcagtgaaccaacattggatgtgaaaattgccttttgtcagggattcgataaacaagtggatgtgtcatatattgccaaacattacaacatgagcaaaagcaaagttgacaaccagttctacagtgtggaagtgggagactcaaccttcacagttctcaagcgctaccagaatctaaagcctattggctctggggctcagggcatagtttgtgccgcgtatgatgctgtccttgacagaaatgtggccattaagaagctcagcagaccctttcagaaccaaacacatgccaagagagcgtaccgggagctggtcctcatgaagtgtgtgaaccataaaaacattattagtttattaaatgtcttcacaccccagaaaacgctggaggagttccaagatgtttacttagtaatggaactgatggatgccaacttatgtcaagtgattcagatggaattagaccatgagcgaatgtcttacctgctgtaccaaatgttgtgtggcattaagcacctccattctgctggaattattcacagggatttaaaaccaagtaacattgtagtcaagtctgattgcacattgaaaatcctggactttggactggccaggacagcaggcacaagcttcatgatgactccatatgtggtgacacgttattacagagcccctgaggtcatcctggggatgggctacaaggagaacgtggatatatggtctgtgggatgcattatgggagaaatggttcgccacaaaatcctctttccaggaagggactatattgaccagtggaataaggtaattgaacaactaggaacaccatgtccagaattcatgaagaaattgcaacccacagtaagaaactatgtggagaatcggcccaagtatgcgggactcaccttccccaaactcttcccagattccctcttcccagcggactccgagcacaataaactcaaagccagccaagccagggacttgttgtcaaagatgctagtgattgacccagcaaaaagaatatcagtggacgacgccttacagcatccctacatcaacgtctggtatgacccagccgaagtggaggcgcctccacctcagatatatgacaagcagttggatgaaagagaacacacaattgaagaatggaaagaacttatctacaaggaagtaatgaattcagaagaaaagactaaaaatggtgtagtaaaaggacagccttctccttcaggtgcagcagtgaacagcagtgagagtctccctccatcctcgtctgtcaatgacatctcctccatgtccaccgaccagaccctggcatctgacactgacagcagcctggaagcctcggcaggacccctgggttgttgcaggtgactagccgcctgcctgcgaaacccagcgttcttcaggagatgat

SEQ ID NO: 57 - protein, 1297 aa, Homo sapiens
METSERLEHISPHELETYRTYRCYSSERGLPRTHRLEASPVALLYSILEALAPHECYSGLNGLYPHEASPLYSGLNVALASPVALSERTYRILEALALYSHISTYRASNMETSERLYSSERLYSVALASPASNGLNPHETYRSERVALGLVALGLYASPSERTHRPHETHRVALLELYSARGTYRGLNASNLELYSPRILEGLYSERGLYALAGLNGLYILEVALCYSALAALATYRASPALAVALLEASPARGASNVALALAILELYSLYSLESERARGPRPHEGLNASNGLNTHRHISALALYSARGALATYRARGGLLEVALLEMETLYSCYSVALASNHISLYSASNILEILESERLELEASNVALPHETHRPRGLNLYSTHRLEGLGLPHEGLNASPVALTYRLEVALMETGLLEMETASPALAASNLECYSGLNVALILEGLNMETGLLEASPHISGLARGMETSERTYRLELETYRGLNMETLECYSGLYILELYSHISLEHISSERALAGLYILEILEHISARGASPLELYSPRSERASNILEVALVALLYSSERASPCYSTHRLELYSILELEASPPHEGLYLEALAARGTHRALAGLYTHRSERPHEMETMETTHRPRTYRVALVALTHRARGTYRTYRARGALAPRGLVALILELEGLYMETGLYTYRLYSGLASNVALASPILETRPSERVALGLYCYSILEMETGLYGLMETVALARGHISLYSILELEPHEPRGLYARGASPTYRILEASPGLNTRPASNLYSVALILEGLGLNLEGLYTHRPRCYSPRGLPHEMETLYSLYSLEGLNPRTHRVALARGASNTYRVALGLASNARGPRLYSTYRALAGLYLETHRPHEPRLYSLEPHEPRASPSERLEPHEPRALAASPSERGLHISASNLYSLELYSALASERGLNALAARGASPLELESERLYSMETLEVALILEASPPRALALYSARGILESERVALASPASPALALEGLNHISPRTYRILEASNVALTRPTYRASPPRALAGLVALGLALAPRPRPRGLNILETYRASPLYSGLNLEASPGLARGGLHISTHRILEGLGLTRPLYSGLLEILETYRLYSGLVALMETASNSERGLGLLYSTHRLYSASNGLYVALVALLYSGLYGLNPRSERPRSERGLYALAALAVALASNSERSERGLSERLEPRPRSERSERSERVALASNASPILESERSERMETSERTHRASPGLNTHRLEALASERASPTHRASPSERSERLEGLALASERALAGLYPRLEGLYCYSCYSARG

SEQ ID NO: 58 - DNA, 1240 bp, Mus musculus
tacaggtaaaacaagggattcgataaacacgtggatgtgtcatctattgccaaacattacaacatgagcaaaagcaaggtggacaaccagttctacagtgtggaagtgggggactcaaccttcaccgttcttaagcgctaccagaacctgaagccaattggctctggggctcagggaatagtctgtgctgcgtacgacgctgtccttgacagaaatgtggccattaagaagctcagcagacccttccagaaccaaactcacgccaagagggcttaccgggagctggtcctcatgaagtgtgtgaaccataaaaacattattagcttattaaatgtttttacaccccagaaaacactggaggagttccaagatgtctacttagtgatggaactgatggacgccaacctgtgtcaggtgattcagatggagctggaccacgagcggatgtcttacttgctgtaccagatgctgtgtggcatcaagcacctccactccgctgggatcatccacagggacttaaaacccagtaacattgtagtcaagtctgattgcacactgaaaatcctcgacttcggactggccaggacagcgggtacaagcttcatgatgactccgtatgtggtgacgcgatattacagagcccctgaggtcatcctgggcatgggctacaaggagaacgtggacatatggtctgtgggatgcatcatgggagaaatggttcgccacaaaatcctctttcccggaagggactatattgaccagtggaacaaagtcatcgagcagctaggaactccgtgtccagagttcatgaagaaattgcagcccacagtcagaaactacgtggagaatcggcccaagtacgcaggactcaccttccccaagctctttccagattccctcttcccagcggattctgagcacaataaacttaaagccagccaagccagggatttgttgtctaagatgttagtgattgacccagcgaagaggatatcggtggacgacgcactgcagcatccgtacatcaacgtttggtacgacccggctgaagtggaggcgcctccgcctcagatatatgataagcagctggatgaaagggagcacaccatcgaagaatggaaagaacttatctacaaggaggtaatgaactcagaagagaagactaagaatggcgtagtcaaaggccagccctcgccttcagcacaggtgcagcagtgaacagcagtgagagtctccctcc

SEQ ID NO: 59 - protein, 1071 aa, Mus musculus
METSERLYSSERLYSVALASPASNGLNPHETYRSERVALGLVALGLYASPSERTHRPHETHRVALLELYSARGTYRGLNASNLELYSPRILEGLYSERGLYALAGLNGLYILEVALCYSALAALATYRASPALAVALLEASPARGASNVALALAILELYSLYSLESERARGPRPHEGLNASNGLNTHRHISALALYSARGALATYRARGGLLEVALLEMETLYSCYSVALASNHISLYSASNILEILESERLELEASNVALPHETHRPRGLNLYSTHRLEGLGLPHEGLNASPVALTYRLEVALMETGLLEMETASPALAASNLECYSGLNVALILEGLNMETGLLEASPHISGLARGMETSERTYRLELETYRGLNMETLECYSGLYILELYSHISLEHISSERALAGLYILEILEHISARGASPLELYSPRSERASNILEVALVALLYSSERASPCYSTHRLELYSILELEASPPHEGLYLEALAARGTHRALAGLYTHRSERPHEMETMETTHRPRTYRVALVALTHRARGTYRTYRARGALAPRGLVALILELEGLYMETGLYTYRLYSGLASNVALASPILETRPSERVALGLYCYSILEMETGLYGLMETVALARGHISLYSILELEPHEPRGLYARGASPTYRILEASPGLNTRPASNLYSVALILEGLGLNLEGLYTHRPRCYSPRGLPHEMETLYSLYSLEGLNPRTHRVALARGASNTYRVALGLASNARGPRLYSTYRALAGLYLETHRPHEPRLYSLEPHEPRASPSERLEPHEPRALAASPSERGLHISASNLYSLELYSALASERGLNALAARGASPLELESERLYSMETLEVALILEASPPRALALYSARGILESERVALASPASPALALEGLNHISPRTYRILEASNVALTRPTYRASPPRALAGLVALGLALAPRPRPRGLNILETYRASPLYSGLNLEASPGLARGGLHISTHRILEGLGLTRPLYSGLLEILETYRLYSGLVALMETASNSERGLGLLYSTHRLYSASNGLYVALVALLYSGLYGLNPRSERPRSERALAGLNVALGLNGLN

SEQ ID NO: 60 - DNA, 1975 bp, Rattus norvegicus
ccctccttattccggtttggaatgtggctaatgaaagcccagtaggaggatttctggggcaaacaggtggaccaggatcctggttctcaggcacggaatggctattgtgagagcgccaccagcaggaccatcgcagatcttggttatggctgctcacgcaagaggctgttgatgtagaccccctttcccgtagatgagaaatcacacgagcagtggtatttatgagcctccatttcttatactactgcagtgaaccaaccttggatgtgaaaattgccttttgtcaggtgtgtgttccttacaggtaaaacaaagggattcgacaaacacgtggatgtgtcttctgttgtcaaacattacaacatgagcaaaagcaaggtagataaccagttctacagtgtggaagtgggagactcaaccttcacagttctaaagcgctaccagaacctgaagccgatcggctctggggctcagggaatagtttgtgctgcgtatgacgctgtcctcgacagaaatgtggccattaagaagctcagcagacccttccagaaccaaactcatgccaagagggcttaccgggagctggtcctcatgaagtgtgtgaaccataaaaacattattagcttattaaatgtctttacaccccagaaaacactggaggagttccaagatgtttacttagtgatggaactgatggacgccaacttgtgtcaggtgattcagatggagctggaccacgagcggatgtcgtacttgctgtaccagatgctgtcggcgatcaaacacctccactccgctgggatcatccacagggacttaaaacccagtaacatcgtagtcaagtctgattgcacactgaaaatcctggactttggactggccaggacagcgggcacaagcttcatgatgactccgtatgtggtgacgagatattacagagcccccgaggtcatcctgggcatgggctacaaggagaacgtggacatatggtctgtgggctgcatcatgggagaaatggttcgtcacaaaatcctctttcccggaagggactatattgaccagtggaacaaagtcatagagcagctaggaactccgtgtccagaattcatgaagaaattgcagcccaccgtcagaaactacgtggagaaccggcccaagtatgcaggcctcaccttccccaagctctttccagattccctcttcccagcggattccgagcacaataaacttaaagccagccaagccagggacttgttgtcaaagatgttagtgattgacccagcgaagaggatatcggtggatgacgcattgcagcatccgtacatcaacgtttggtacgaccctgctgaagtggaggcgcctccgcctcagatatatgacaagcaattggatgaaagggagcacaccatcgaagaatggaaagaactcatctacaaggaagtaatgaactcagaagagaagactaagaacggcgtagtcaaaggccagccctcaccttcaggtgcagcagtgaacagcagtgagagtctccctccatcctcatctgtcaacgacatctcctccatgtccaccgaccagaccctcgcatccgacactgacagcagcctggaagcctcggcgggaccgctgggttgttgcaggtgactagccgcctgcctgcgaaacccagcgttcttcaggagatgacgccatgatagaacacagcgcacatgcacacacacagagcttgtacacacacacacacacacacacacacgcacgcacgcacgcacgcaagcacgcacgcacgcacaaatgcactcacgcaatgtcaagaaaaaaaaaagtagcgagagagagcgagagagccaacgtaaaactaagttaaatctttctgcgtgcttctccagagttctgtatcgcagctgagctgaaatgtatacttaacttctagtcgcgctcgctcgactttggtctccctccggcagtgcttact

SEQ ID NO: 61 - protein, 1188 aa, Rattus norvegicus
METSERLYSSERLYSVALASPASNGLNPHETYRSERVALGLVALGLYASPSERTHRPHETHRVALLELYSARGTYRGLNASNLELYSPRILEGLYSERGLYALAGLNGLYILEVALCYSALAALATYRASPALAVALLEASPARGASNVALALAILELYSLYSLESERARGPRPHEGLNASNGLNTHRHISALALYSARGALATYRARGGLLEVALLEMETLYSCYSVALASNHISLYSASNILEILESERLELEASNVALPHETHRPRGLNLYSTHRLEGLGLPHEGLNASPVALTYRLEVALMETGLLEMETASPALAASNLECYSGLNVALILEGLNMETGLLEASPHISGLARGMETSERTYRLELETYRGLNMETLESERALAILELYSHISLEHISSERALAGLYILEILEHISARGASPLELYSPRSERASNILEVALVALLYSSERASPCYSTHRLELYSILELEASPPHEGLYLEALAARGTHRALAGLYTHRSERPHEMETMETTHRPRTYRVALVALTHRARGTYRTYRARGALAPRGLVALILELEGLYMETGLYTYRLYSGLASNVALASPILETRPSERVALGLYCYSILEMETGLYGLMETVALARGHISLYSILELEPHEPRGLYARGASPTYRILEASPGLNTRPASNLYSVALILEGLGLNLEGLYTHRPRCYSPRGLPHEMETLYSLYSLEGLNPRTHRVALARGASNTYRVALGLASNARGPRLYSTYRALAGLYLETHRPHEPRLYSLEPHEPRASPSERLEPHEPRALAASPSERGLHISASNLYSLELYSALASERGLNALAARGASPLELESERLYSMETLEVALILEASPPRALALYSARGILESERVALASPASPALALEGLNHISPRTYRILEASNVALTRPTYRASPPRALAGLVALGLALAPRPRPRGLNILETYRASPLYSGLNLEASPGLARGGLHISTHRILEGLGLTRPLYSGLLEILETYRLYSGLVALMETASNSERGLGLLYSTHRLYSASNGLYVALVALLYSGLYGLNPRSERPRSERGLYALAALAVALASNSERSERGLSERLEPRPRSERSERSERVALASNASPILESERSERMETSERTHRASPGLNTHRLEALASERASPTHRASPSERSERLEGLALASERALAGLYPRLEGLYCYSCYSARG

SEQ ID NO: 62 - DNA, 1093 bp, Homo sapiens
ccctggctccccagctgcgctgccccgggcgtccacgccctgcgggcttagcgggttcagtgggctcaatctgcgcagcgccacctccatgttgaccaagcctctacaggggcctcccgcgccccccgggactcccacgccgccgccaggaggcaaggatcgggaagcgttcgaggccgagtatcgactcggccccctcctgggtaaggggggctttggcaccgtcttcgcaggacaccgcctcacagatcgactccaggtggccatcaaagtgattccccggaatcgtgtgctgggctggtcccccttgtcagactcagtcacatgcccactcgaagtcgcactgctatggaaagtgggtgcaggtggtgggcaccctggcgtgatccgcctgcttgactggtttgagacacaggagggcttcatgctggtcctcgagcggcctttgcccgcccaggatctctttgactatatcacagagaagggcccactgggtgaaggcccaagccgctgcttctttggccaagtagtggcagccatccagcactgccattcccgtggagttgtccatcgtgacatcaaggatgagaacatcctgatagacctacgccgtggctgtgccaaactcattgattttggttctggtgccctgcttcatgatgaaccctacactgactttgatgggacaagggtgtacagccccccagagtggatctctcgacaccagtaccatgcactcccggccactgtctggtcactgggcatcctcctctatgacatggtgtgtggggacattccctttgagagggaccaggagattctggaagctgagctccacttcccagcccatgtctccccagactgctgtgccctaatccgccggtgcctggcccccaaaccttcttcccgaccctcactggaagagatcctgctggacccctggatgcaaacaccagccgaggatgtacccctcaacccctccaaaggaggccctgcccctttggcctggtccttgctaccctaagcctggcctggcctggcctggcccccaatggtcagaagagccatcccatggccctgtcacagggataga

SEQ ID NO: 63 - protein, 840 aa, Homo sapiens
METLETHRLYSPRLEGLNGLYPRPRALAPRPRGLYTHRPRTHRPRPRPRGLYGLYLYSASPARGGLALAPHEGLALAGLTYRARGLEGLYPRLELEGLYLYSGLYGLYPHEGLYTHRVALPHEALAGLYHISARGLETHRASPARGLEGLNVALALAILELYSVALILEPRARGASNARGVALLEGLYTRPSERPRLESERASPSERVALTHRCYSPRLEGLVALALALELETRPLYSVALGLYALAGLYGLYGLYHISPRGLYVALILEARGLELEASPTRPPHEGLTHRGLNGLGLYPHEMETLEVALLEGLARGPRLEPRALAGLNASPLEPHEASPTYRILETHRGLLYSGLYPRLEGLYGLGLYPRSERARGCYSPHEPHEGLYGLNVALVALALAALAILEGLNHISCYSHISSERARGGLYVALVALHISARGASPILELYSASPGLASNILELEILEASPLEARGARGGLYCYSALALYSLEILEASPPHEGLYSERGLYALALELEHISASPGLPRTYRTHRASPPHEASPGLYTHRARGVALTYRSERPRPRGLTRPILESERARGHISGLNTYRHISALALEPRALATHRVALTRPSERLEGLYILELELETYRASPMETVALCYSGLYASPILEPRPHEGLARGASPGLNGLILELEGLALAGLLEHISPHEPRALAHISVALSERPRASPCYSCYSALALEILEARGARGCYSLEALAPRLYSPRSERSERARGPRSERLEGLGLILELELEASPPRTRPMETGLNTHRPRALAGLASPVALPRLEASNPRSERLYSGLYGLYPRALAPRLEALATRPSERLELEPR

SEQ ID NO: 64 - DNA, 2039 bp, Mus musculus
agtagcgttggggctggcgcgcgcgacgaatcttaacgctgcgccgtctgcaggcgcttccgggccgccagattccctgccttccaccctggcgccccccagccctggctctccggccgctctgccccgggcatccacgccctgcgggctcagcggattcagcgggctcaatatacgcagcacctcctccatgttgaccaagcctctgcaggggcatccttcgccccctgtgacccccacgcagcctccaggaggcaaggatcgggcagctttcgaggccgaataccgacttggccccctcctgggtaagggaggctttggcaccgtcttcgcgggacaccgcgtcacggatagacgtcaggtggccatcaaagtaatctcccggaaccgtgtgctaggctggtccaccgtgtcagactcagtcacctgcccacttgaggttgcgctgctgtggaaggtgggtgaaggcaatggccatccgggtgtgatacgccttcttgactggttcgaaacacccgaaggcttcatgctggtccttgagcggcctatgcctgctcaggatctcttcgactatatcacagagaaggggccgctgggtgaaagctgtagccgcagcttctttacccaagtcgtggcagctgtccagcactgccacgcccgtggagttgtccatcgggatatcaaggatgagaacatcctgatcgacctatgccggggttccattaaactcattgattttggttccggcgccctgcttcacgatgagccgtacactgactttgatgggacaagagtgtatagccctccagagtggatctcgcgacaccagtaccatgccctgccagcgaccgtctggtcactaggtgtcctactctatgacatggtctgtggggacattcccttcgagagagaccaggagattctggaggctgagctgcacttccctgctcatgtctcccccgattgctgtgccctaatccgccggtgcctggcccctaaaccctgctcccgaccctcactggaggagattctgctggacccctggatgcaatcaccagctgaagaaaagcccatcaactcctccaaaggaagccccacccccttgccctggtccctgcttccctagacccagccaggctctctggttggaatcccatggcacgctacagggatagatggacatctgttgacctggttatacaggttgttaaaaatccagtattactaaggtcagggaatagggatcaggggtcagaagaagatgatagccaagtctgcccagttcctatccaatctggaaggagctctcctcccagaaccgtggtccctaatttgggagggggagttacttgtttcttgttctgttaaagatgtttatttggttggattccttccctctgggccctaagattcttaatctgacattgtagtccctacactggcacttcctatactaccacaaaccacgtacacacttagttcaaatgctctcacttgggcaagggtgctttccttaaaattgggcccatccccagcagctctttaggcaaagggccttccctgggatctcattctgttgctgcctgcctgccttagcccagacttggtgattctgggggaggtactgctcattaattagttaatatcccacgcttccttcctttttcttcctttgtttggtgagggaccctactgttacccaagtgctcttattccggtgagaagaacctcacttccatgatttgggaaggaatgggagatggcatcaccggacaccaccagagactaggatgggatggatggttttggggggatgagatggaggaaataagtcttattgttgttctcctggggccccccctttccaacttttgctgcctcctcctgagccaggattgtccagtggttgaaatgtaaataattctgtactggaggtggagagcggcaagtgccctcctgtcccttcctcccccctgcctggattatttaaaaagccatgtgtggaaacctatttaataaataatgaagtcacaaaaaag

SEQ ID NO: 65 - protein, 1009 aa, Mus musculus
METALAARGALATHRASNLEASNALAALAPRSERALAGLYALASERGLYPRPRASPSERLEPRSERTHRLEALAPRPRSERPRGLYSERPRALAALALEPRARGALASERTHRPRCYSGLYLESERGLYPHESERGLYLEASNILEARGSERTHRSERSERMETLETHRLYSPRLEGLNGLYHISPRSERPRPRVALTHRPRTHRGLNPRPRGLYGLYLYSASPARGALAALAPHEGLALAGLTYRARGLEGLYPRLELEGLYLYSGLYGLYPHEGLYTHRVALPHEALAGLYHISARGVALTHRASPARGARGGLNVALALAILELYSVALILESERARGASNARGVALLEGLYTRPSERTHRVALSERASPSERVALTHRCYSPRLEGLVALALALELETRPLYSVALGLYGLGLYASNGLYHISPRGLYVALILEARGLELEASPTRPPHEGLTHRPRGLGLYPHEMETLEVALLEGLARGPRMETPRALAGLNASPLEPHEASPTYRILETHRGLLYSGLYPRLEGLYGLSERCYSSERARGSERPHEPHETHRGLNVALVALALAALAVALGLNHISCYSHISALAARGGLYVALVALHISARGASPILELYSASPGLASNILELEILEASPLECYSARGGLYSERILELYSLEILEASPPHEGLYSERGLYALALELEHISASPGLPRTYRTHRASPPHEASPGLYTHRARGVALTYRSERPRPRGLTRPILESERARGHISGLNTYRHISALALEPRALATHRVALTRPSERLEGLYVALLELETYRASPMETVALCYSGLYASPILEPRPHEGLARGASPGLNGLILELEGLALAGLLEHISPHEPRALAHISVALSERPRASPCYSCYSALALEILEARGARGCYSLEALAPRLYSPRCYSSERARGPRSERLEGLGLILELELEASPPRTRPMETGLNSERPRALAGLGLLYSPRILEASNSERSERLYSGLYSERPRTHRPRLEPRTRPSERLELEPR

SEQ ID NO: 66 - protein, 941 aa, Mus musculus
METALAPRPRSERPRGLYSERPRALAALALEPRARGALASERTHRPRCYSGLYLESERGLYPHESERGLYLEASNILEARGSERTHRSERSERMETLETHRLYSPRLEGLNGLYHISPRSERPRPRVALTHRPRTHRGLNPRPRGLYGLYLYSASPARGALAALAPHEGLALAGLTYRARGLEGLYPRLELEGLYLYSGLYGLYPHEGLYTHRVALPHEALAGLYHISARGVALTHRASPARGARGGLNVALALAILELYSVALILESERARGASNARGVALLEGLYTRPSERTHRVALSERASPSERVALTHRCYSPRLEGLVALALALELETRPLYSVALGLYGLGLYASNGLYHISPRGLYVALILEARGLELEASPTRPPHEGLTHRPRGLGLYPHEMETLEVALLEGLARGPRMETPRALAGLNASPLEPHEASPTYRILETHRGLLYSGLYPRLEGLYGLSERCYSSERARGSERPHEPHETHRGLNVALVALALAALAVALGLNHISCYSHISALAARGGLYVALVALHISARGASPILELYSASPGLASNILELEILEASPLECYSARGGLYSERILELYSLEILEASPPHEGLYSERGLYALALELEHISASPGLPRTYRTHRASPPHEASPGLYTHRARGVALTYRSERPRPRGLTRPILESERARGHISGLNTYRHISALALEPRALATHRVALTRPSERLEGLYVALLELETYRASPMETVALCYSGLYASPILEPRPHEGLARGASPGLNGLILELEGLALAGLLEHISPHEPRALAHISVALSERPRASPCYSCYSALALEILEARGARGCYSLEALAPRLYSPRCYSSERARGPRSERLEGLGLILELELEASPPRTRPMETGLNSERPRALAGLGLLYSPRILEASNSERSERLYSGLYSERPRTHRPRLEPRTRPSERLELEPR

SEQ ID NO: 67 - protein, 848 aa, Mus musculus
METLETHRLYSPRLEGLNGLYHISPRSERPRPRVALTHRPRTHRGLNPRPRGLYGLYLYSASPARGALAALAPHEGLALAGLTYRARGLEGLYPRLELEGLYLYSGLYGLYPHEGLYTHRVALPHEALAGLYHISARGVALTHRASPARGARGGLNVALALAILELYSVALILESERARGASNARGVALLEGLYTRPSERTHRVALSERASPSERVALTHRCYSPRLEGLVALALALELETRPLYSVALGLYGLGLYASNGLYHISPRGLYVALILEARGLELEASPTRPPHEGLTHRPRGLGLYPHEMETLEVALLEGLARGPRMETPRALAGLNASPLEPHEASPTYRILETHRGLLYSGLYPRLEGLYGLSERCYSSERARGSERPHEPHETHRGLNVALVALALAALAVALGLNHISCYSHISALAARGGLYVALVALHISARGASPILELYSASPGLASNILELEILEASPLECYSARGGLYSERILELYSLEILEASPPHEGLYSERGLYALALELEHISASPGLPRTYRTHRASPPHEASPGLYTHRARGVALTYRSERPRPRGLTRPILESERARGHISGLNTYRHISALALEPRALATHRVALTRPSERLEGLYVALLELETYRASPMETVALCYSGLYASPILEPRPHEGLARGASPGLNGLILELEGLALAGLLEHISPHEPRALAHISVALSERPRASPCYSCYSALALEILEARGARGCYSLEALAPRLYSPRCYSSERARGPRSERLEGLGLILELELEASPPRTRPMETGLNSERPRALAGLGLLYSPRILEASNSERSERLYSGLYSERPRTHRPRLEPRTRPSERLELEPR

SEQ ID NO: 68 - DNA, 1793 bp, Rattus norvegicus
gcgcgacgaatcttaacgctgcgccgtctgcaggcgcttccgggccaccagattccctgccttccaccctggcgccccccagccctggctctccggccgctctgccccgggcatccacgccctgcgggctcagcggattcagcgggctcaatctgcgcagcacctcctccatgttgaccaagcctctgcaggggcttccttcgccccctgtgacccccacgcagcctccaggaggcaaggatcgggcagctttcgaggccgaataccgacttggccctctcctgggtaagggaggctttggcaccgtcttcgcgggacaccgcgtcacggatagacgtcaggtggccatcaaagtaatctcccggaaccgtgtgctaggctggtccactgtgtcagactcagtcacctgcccacttgaggtggcactgctgtggaaggtgggtgaaggtaatggtcatccgggtgtgatccgcctgcttgactggtttgagacaccagaaggcttcatgctggtccttgagcggcctatgcctgcccaggatctcttcgactacatcacagagaagggtccgctgggtgaaagctgtagccgcagcttcttcacccaagtagtggcagctgtccagcactgccacgcccgtggcgttgtccatcgtgacatcaaggatgagaacatcctgatagacctgtgccggggttctgttaaactcattgatttcggttctggtgcgctgcttcatgatgaaccatacacggactttgatgggacaagggtgtacagccctcccgagtggatctcgagacaccagtaccatgcccttccagctactgtctggtcactgagtgtcctactctatgacatggtgtgtggggacattcccttcgagagagatcaggagattctggaggctgagcttcacttccctgctcacgtgtccccagattgctgtgccctaatccgacggtgcctggcccctaaaccctgttcccgaccctcactggaggagatactgctggacccctggatgcaaacaccagctgaagaaaaacccatcaacccctccaaaggaagccccacccccttgccctggtctctgggtccctaggcccagccaggctctctggttggaatcccatggtcatgatacagggatagatggacatctgttgacctggttgtacaggttgctaaaaatccagtattactaaggtcagggaatagggattgagggtcagaagatagccaagtctgcccagttcctatcccaatcccgggaaggagctctcctcccagaacctgtggtccctaatttgggagggggaagttacttgtttcttgttctgttaaggatgtttatttggttggattccttcccttctggtccctaagattcttattctgacattgtagtccctacactggcaccccctatactactaccacaaacttagacacttagttcaaatgctctcacttgggcaagggtgctttccttaagattacccccacccccagcagctctttagcaaaagggccttaccctgggatttcattcagttgctgctttgcctgccttagcccagaagtgattattctggggaggtaacgccccattaattagaatcccagtgctcccccctttttttccctttgtttggtgaggggaccctactgttatcccaagtgctcttattctggtgagaagaaccttacttccataatttgggaaggaatgggagatggacatcaccggacaccaccagagattaggatgggatggatggttttgggg

SEQ ID NO: 69 - protein, 998 aa, Rattus norvegicus
ALATHRASNLEASNALAALAPRSERALAGLYALASERGLYPRPRASPSERLEPRSERTHRLEALAPRPRSERPRGLYSERPRALAALALEPRARGALASERTHRPRCYSGLYLESERGLYPHESERGLYLEASNLEARGSERTHRSERSERMETLETHRLYSPRLEGLNGLYLEPRSERPRPRVALTHRPRTHRGLNPRPRGLYGLYLYSASPARGALAALAPHEGLALAGLTYRARGLEGLYPRLELEGLYLYSGLYGLYPHEGLYTHRVALPHEALAGLYHISARGVALTHRASPARGARGGLNVALALAILELYSVALILESERARGASNARGVALLEGLYTRPSERTHRVALSERASPSERVALTHRCYSPRLEGLVALALALELETRPLYSVALGLYGLGLYASNGLYHISPRGLYVALILEARGLELEASPTRPPHEGLTHRPRGLGLYPHEMETLEVALLEGLARGPRMETPRALAGLNASPLEPHEASPTYRILETHRGLLYSGLYPRLEGLYGLSERCYSSERARGSERPHEPHETHRGLNVALVALALAALAVALGLNHISCYSHISALAARGGLYVALVALHISARGASPILELYSASPGLASNILELEILEASPLECYSARGGLYSERVALLYSLEILEASPPHEGLYSERGLYALALELEHISASPGLPRTYRTHRASPPHEASPGLYTHRARGVALTYRSERPRPRGLTRPILESERARGHISGLNTYRHISALALEPRALATHRVALTRPSERLESERVALLELETYRASPMETVALCYSGLYASPILEPRPHEGLARGASPGLNGLILELEGLALAGLLEHISPHEPRALAHISVALSERPRASPCYSCYSALALEILEARGARGCYSLEALAPRLYSPRCYSSERARGPRSERLEGLGLILELELEASPPRTRPMETGLNTHRPRALAGLGLLYSPRILEASNPRSERLYSGLYSERPRTHRPRLEPRTRPSERLEGLYPR

SEQ ID NO: 70 - DNA, 6648 bp, Mus musculus
atggcgacacggagcagcaggagggagtcgagactccctttcctattcgccctggtcgcgctgctaccccgcggggctctcggcgggggctggacgcagagattgcacggtggcccggcgcccttgccccaggaccggggcttcttcgtggtgcagggcgacccgcgcgatctccggctaggaacgcacggggatgccccgggggcgagcccggcggccaggaagccactcaggacccggcggagcgctgctctgcagccccagcctatccaggtgtatggacaggtcagtctgaatgactcccacaatcagatggtggtgcactgggccggagagaaaagcaacgtgatcgtggcattagcccgagacagcctggcgttggcaaggcccaagagcagtgatgtgtatgtgtcttacgactatggaaaatcattcagtaagatttcagagaagctgaactttggcgtgggcaacaacagcgaagctgtgatctcccagttctaccacagccctgccgacaacaagaggtacatctttgtggatgcttacgcccaatacctctggatcacgtttgacttctgcagcactatccatggcttctccatcccattccgggcggctgatctcctcctccatagcaaggcctccaacctcctcttgggctttgacaggtctcaccccaacaagcagctatggaagtcagatgattttggccagacctggatcatgattcaggaacacgtgaagtccttctcttggggaatcgacccctatgatcagccaaacgctatctacattgagcgacatgaaccctttgggttctccacagtgctccgcagtacagacttcttccagtcccgggaaaaccaggaagtgatcctggaggaagtgagagactttcagcttcgggacaagtacatgtttgctacaaaggtggtgcatcttccgggcagccagcagcagtcatctgtccagctctgggtctcctttggccggaagcctatgagagcagcccagtttgtcacaaagcatcctattaatgaatattacatcgctgatgccgccgaggaccaggtgtttgtgtgtgttagccacagtaacaacagcactaacctatacatctcagaggcggaggggctgaagttctccctctccttggagaatgtgctgtattacagcccaggaggggccggcagtgacactctggtgaggtattttgcaaatgagccgtttgccgactttcaccgcgtggaaggcttacaaggggtctatattgccaccctgattaatggttctatgaatgaggagaacatgaggtcggtcatcacctttgacaaagggggaacctgggaatttcttcaggccccagccttcacaggatatggagagaaaatcaattgtgagctttctcagggttgttccctccacctggcccagcgcctcagtcaactgctcaacctccaacttcggaggatgcctatcctatccaaggagtcagcccccggtctcatcattgctaccggctctgtgggaaagaacttggccagcaagaccaatgtgtacatctctagcagtgctggagccaggtggagagaggctcttcccggacctcattactatacttggggtgaccatggaggcatcatcatggcgattgcccagggcatggagaccaacgagctgaagtacagcaccaatgaaggggagacctggaagacgttcgtcttctcggagaagcctgtgtttgtgtatgggcttctcacagaacctggtgagaagagcaccgtcttcaccatcttcggctcgaacaaggagagtgtccacagctggctcatcctgcaagtcaatgccactgatgccttgggggttccttgcacagaaaacgactacaagctgtggtccccatctgatgagcgaggaaatgagtgtttgctaggacacaagacagttttcaaaaggaggacccctcacgccacatgctttaatggggaagactttgaccggccagtggttgtgtccaactgctcctgcacccgggaggactacgaatgtgactttggcttcaagatgagcgaagatctctccttagaggtttgtgttccagaccctgagttttctgggaagccctacagccctcctgtgccttgtcctgtgggttcttcatacaggagaacgagaggctatcggaagatttctggggatacgtgcagtggaggagacgttgaagcacggctggaaggggagctggtcccctgtccccttgcagaagagaatgagttcatcctatacgccatgcgcaagtccatctaccgctacgacttggcctcgggagccacagagcagcttcctctctggggcttgcgggcggctgtggccctggactttgactatgaacgcaactgcttgtattggtctgacctggcactggacaccatccagcgtctctgcttgaacgggagcacagggcaggaggtgatcatcaattccggcctggagaccgtggaggctttggccttcgaacccctcagccaattactttactgggtggatgccggctttaaaaagatcgaggtagctaatccagatggtgacttccgactgacaatcgtcaattcatctgtgcttgatcgacccagggctctagtccttgtaccccaagaaggggtgatgttctggactgactggggggacctgaagcctgggatttaccggagctacatggacggctctgctgcctaccgccttgtgtcagaggacgtgaagtggcccaatggcatctctgtggacagccagtggatctactggacggatgcttacctggactgtatcgagcgcatcactttcagtggccagcagggttcagtcatccttgacagcctcccacacccctacgccatcgctgtctttaagaatgagatctactgggacgactggtcacagctcagcatcttcagagcttcgaagcacagcagatcccaggtggagattctagcaagccagctcacgggcctcatggacatgaaggttttctacaagggaaagaatgctggaagcaatgcttgcgtccctcagccctgcagtctactgtgcctccctaaggccaacaacagcaaaagctgcaggtgtccagaaggtgtggccagcagtgtcctcccctctggggacctgatgtgtgactgccctcagggctatcaaaggaagaacaacacctgtgtcaaagaagagaacacctgtctccgcaaccagtaccgctgcagcaacggcaactgtatcaacagcatttggtggtgtgatttcgacaatgactgtggagacatgagtgacgagagaaattgccccacgacggtctgtgatgcagacactcagttccggtgccaggagtcggggacttgcattccactctcctataagtgtgaccttgaagatgactgtggagataacagtgatgagagtcactgtgagatgcaccagtgtcgtagcgacgagttcaactgcagctctgggatgtgcatccggtcctcctgggtgtgtgatggagacaacgactgtagggactggtctgatgaagccaactgtactgccatctatcatacctgtgaggcctccaacttccagtgccacaatgggcactgcatcccccagcgatgggcatgtgacggtgatgcggattgccaggatggctctgatgaagatcccgtcagctgtgagaaaaagtgcaacggattccactgcccaaacggcacgtgcatcccgtccagcaagcattgtgatgggctgagggactgccccgacggctccgatgatgagcactgtgagcccttctgcacgcgcttcatggacttcgtgtgtaagaaccgtcagcagtgtctgttccactccatggtgtgtgacgggatcgtccagtgccgagatggctctgatgaggatgcggccttcgctggatgctcgcaagaccccgagttccacaaggagtgcgatgagttcggcttccagtgtcagaacggagtgtgcatcagcttgatttggaaatgcgatgggatggatgactgcggggactactctgacgaggccaactgtgaaaaccccacagaagccccaaactgttcccgttactttcagttccactgtgagaatggccactgcatccccaacaggtggaaatgtgacagagagaacgactgtggggactggtctgatgagaaggattgtggagattcacatgttctgccctccccgacccccgggccctccacgtgtttgcccaattacttcgcgtgcagcagcggggcctgtgtgatgggcacctgggtgtgcgacggctacagggactgtgcagatggctctgatgaggaggcctgcccctctctagcaaactccactgccgcctccactcccacccagctcgggcagtgcgaccgatttgagttcgagtgtcaccaaccaaagaaatgtatccccaactggaagcgctgtgacggccaccaagattgccaagacggccaggatgaagccaactgccccactcacagcaccttgacctgtacgagcagggagttcaagtgtgaggacggcgaggcatgcatcgtgctctcagagcgctgtgatggcttcctggattgctccgatgagagcgatgagaaggcctgcagcgatgagttaactgtatacaaagtgcagaatctccagtggacagctgatttctccggggatgtgactttgacctggatgcggccaaagaaaatgccatctgcttcttgtgtatacaatgtctactacagggtggttggagagagcatatggaagaccctggaaacccacagcaataaaacaagcactgtgctcaaggtcctgaagccagacaccacgtaccaggttaaggtccaggtgcactgcctcaacaaggtgcacaacaccaatgactttgtgaccctcaggactccagaagggttgccagatgcccctcggaatctccagctctccctgaacagggaagaggaaggtgtgattctcgggcactgggctcctcccgtccacacccatggcctcatccgtgagtacattgtggaatacagcaggagtgggtccaagatgtgggcctcccagagagctgctagcaactctacagaaataaagaacttactgctcaatgccctctacactgtcagagtggctgcggtgactagtcgtgggataggaaactggagtgattctaagtccatcaccaccataaaaggaaaagtgatccaagcaccaaatatccacattgacagctacgatgaaaattctctgagctttaccctgaccatggatggtgacatcaaggtcaatggctacgtggtgaaccttttctggtcatttgatgcccacaaacaagaaaagaaaaccctgagcttccgcggagggagtgcactgtcacacaaagttagcaacctgacagctcatacatcctatgagatttctgcctgggccaagacagacttgggagatagcccactggcctttgagcacatcttgaccagaggcagcagtccaccagctcctagtctcaaagccaaggccatcaatcagactgcagtggagtgcatctggactggccccaagaatgtggtgtatggtattttctatgccacatccttccttgacctctaccgaaaccctaagagcgtaactacttcgctccacaataagacagtcatcgtcagcaaggatgagcagtatctgtttctggtccgggtgttgatcccttaccaagggccgtcttctgactacgttgtagtgaagatgatcccagacagcaggctcccacctcgccatctgcacgcggtccacataggcaaaacctcagcactcatcaaatgggaatcgccctatgactctcctgaccaggacttgttttacgccattgcagtgaaagatctgatcaggaagacggacagaagctacaaagtcagatcccgcaacagtactgtggagtacagcctaagcaagctggaacctggagggaaataccacatcattgtccagctgggaaacatgagcaaggattccagcataaaaatcaccacagtttcgttatcagcacctgatgccttaaaaatcataacggaaaacgaccacgttctcctcttttggaaaagcctagcattgaaggaaaagcagttcaatgaaaccaggggctatgagatccacatgtctgacagtgctgtgaatctcaccgcttacctcgggaatactacggacaatttctttaaagtgtccaacctgaagatgggtcataactacactttcacggtccaagcgcggtgtctctttggtagccagatctgtggggagcccgccgtgctgctgtatgatgaactgagctcaggtgcagatgcggcagtgatccacgctgcccggtctactgatgttgcagctgtggtggttcccatcctgttcctgatcctgctgagcctgggtgtcggcttcgccatcctctacacgaagcaccgtcgcttacagagcagcttcagcgctttcgccaatagccactacagctccaggctgggctcggccatcttctcctcaggggatgacctaggagaggacgatgaagatgctcccatgattactggattctcagacgatgtccccatggtgatagcgtga

SEQ ID NO: 71 - protein, 6238 aa, Mus musculus
METALATHRARGSERSERARGARGGLSERARGLEPRPHELEPHEALALEVALALALELEPRARGGLYALALEGLYGLYGLYTRPTHRGLNARGLEHISGLYGLYPRALAPRLEPRGLNASPARGGLYPHEPHEVALVALGLNGLYASPPRARGASPLEARGLEGLYTHRHISGLYASPALAPRGLYALASERPRALAALAARGLYSPRLEARGTHRARGARGSERALAALALEGLNPRGLNPRILEGLNVALTYRGLYGLNVALSERLEASNASPSERHISASNGLNMETVALVALHISTRPALAGLYGLLYSSERASNVALILEVALALALEALAARGASPSERLEALALEALAARGPRLYSSERSERASPVALTYRVALSERTYRASPTYRGLYLYSSERPHESERLYSILESERGLLYSLEASNPHEGLYVALGLYASNASNSERGLALAVALILESERGLNPHETYRHISSERPRALAASPASNLYSARGTYRILEPHEVALASPALATYRALAGLNTYRLETRPILETHRPHEASPPHECYSSERTHRILEHISGLYPHESERILEPRPHEARGALAALAASPLELELEHISSERLYSALASERASNLELELEGLYPHEASPARGSERHISPRASNLYSGLNLETRPLYSSERASPASPPHEGLYGLNTHRTRPILEMETILEGLNGLHISVALLYSSERPHESERTRPGLYILEASPPRTYRASPGLNPRASNALAILETYRILEGLARGHISGLPRPHEGLYPHESERTHRVALLEARGSERTHRASPPHEPHEGLNSERARGGLASNGLNGLVALILELEGLGLVALARGASPPHEGLNLEARGASPLYSTYRMETPHEALATHRLYSVALVALHISLEPRGLYSERGLNGLNGLNSERSERVALGLNLETRPVALSERPHEGLYARGLYSPRMETARGALAALAGLNPHEVALTHRLYSHISPRILEASNGLTYRTYRILEALAASPALAALAGLASPGLNVALPHEVALCYSVALSERHISSERASNASNSERTHRASNLETYRILESERGLALAGLGLYLELYSPHESERLESERLEGLASNVALLETYRTYRSERPRGLYGLYALAGLYSERASPTHRLEVALARGTYRPHEALAASNGLPRPHEALAASPPHEHISARGVALGLGLYLEGLNGLYVALTYRILEALATHRLEILEASNGLYSERMETASNGLGLASNMETARGSERVALILETHRPHEASPLYSGLYGLYTHRTRPGLPHELEGLNALAPRALAPHETHRGLYTYRGLYGLLYSILEASNCYSGLLESERGLNGLYCYSSERLEHISLEALAGLNARGLESERGLNLELEASNLEGLNLEARGARGMETPRILELESERLYSGLSERALAPRGLYLEILEILEALATHRGLYSERVALGLYLYSASNLEALASERLYSTHRASNVALTYRILESERSERSERALAGLYALAARGTRPARGGLALALEPRGLYPRHISTYRTYRTHRTRPGLYASPHISGLYGLYILEILEMETALAILEALAGLNGLYMETGLTHRASNGLLELYSTYRSERTHRASNGLGLYGLTHRTRPLYSTHRPHEVALPHESERGLLYSPRVALPHEVALTYRGLYLELETHRGLPRGLYGLLYSSERTHRVALPHETHRILEPHEGLYSERASNLYSGLSERVALHISSERTRPLEILELEGLNVALASNALATHRASPALALEGLYVALPRCYSTHRGLASNASPTYRLYSLETRPSERPRSERASPGLARGGLYASNGLCYSLELEGLYHISLYSTHRVALPHELYSARGARGTHRPRHISALATHRCYSPHEASNGLYGLASPPHEASPARGPRVALVALVALSERASNCYSSERCYSTHRARGGLASPTYRGLCYSASPPHEGLYPHELYSMETSERGLASPLESERLEGLVALCYSVALPRASPPRGLPHESERGLYLYSPRTYRSERPRPRVALPRCYSPRVALGLYSERSERTYRARGARGTHRARGGLYTYRARGLYSILESERGLYASPTHRCYSSERGLYGLYASPVALGLALAARGLEGLGLYGLLEVALPRCYSPRLEALAGLGLASNGLPHEILELETYRALAMETARGLYSSERILETYRARGTYRASPLEALASERGLYALATHRGLGLNLEPRLETRPGLYLEARGALAALAVALALALEASPPHEASPTYRGLARGASNCYSLETYRTRPSERASPLEALALEASPTHRILEGLNARGLECYSLEASNGLYSERTHRGLYGLNGLVALILEILEASNSERGLYLEGLTHRVALGLALALEALAPHEGLPRLESERGLNLELETYRTRPVALASPALAGLYPHELYSLYSILEGLVALALAASNPRASPGLYASPPHEARGLETHRILEVALASNSERSERVALLEASPARGPRARGALALEVALLEVALPRGLNGLGLYVALMETPHETRPTHRASPTRPGLYASPLELYSPRGLYILETYRARGSERTYRMETASPGLYSERALAALATYRARGLEVALSERGLASPVALLYSTRPPRASNGLYILESERVALASPSERGLNTRPILETYRTRPTHRASPALATYRLEASPCYSILEGLARGILETHRPHESERGLYGLNGLNGLYSERVALILELEASPSERLEPRHISPRTYRALAILEALAVALPHELYSASNGLILETYRTRPASPASPTRPSERGLNLESERILEPHEARGALASERLYSHISSERARGSERGLNVALGLILELEALASERGLNLETHRGLYLEMETASPMETLYSVALPHETYRLYSGLYLYSASNALAGLYSERASNALACYSVALPRGLNPRCYSSERLELECYSLEPRLYSALAASNASNSERLYSSERCYSARGCYSPRGLGLYVALALASERSERVALLEPRSERGLYASPLEMETCYSASPCYSPRGLNGLYTYRGLNARGLYSASNASNTHRCYSVALLYSGLGLASNTHRCYSLEARGASNGLNTYRARGCYSSERASNGLYASNCYSILEASNSERILETRPTRPCYSASPPHEASPASNASPCYSGLYASPMETSERASPGLARGASNCYSPRTHRTHRVALCYSASPALAASPTHRGLNPHEARGCYSGLNGLSERGLYTHRCYSILEPRLESERTYRLYSCYSASPLEGLASPASPCYSGLYASPASNSERASPGLSERHISCYSGLMETHISGLNCYSARGSERASPGLPHEASNCYSSERSERGLYMETCYSILEARGSERSERTRPVALCYSASPGLYASPASNASPCYSARGASPTRPSERASPGLALAASNCYSTHRALAILETYRHISTHRCYSGLALASERASNPHEGLNCYSHISASNGLYHISCYSILEPRGLNARGTRPALACYSASPGLYASPALAASPCYSGLNASPGLYSERASPGLASPPRVALSERCYSGLLYSLYSCYSASNGLYPHEHISCYSPRASNGLYTHRCYSILEPRSERSERLYSHISCYSASPGLYLEARGASPCYSPRASPGLYSERASPASPGLHISCYSGLPRPHECYSTHRARGPHEMETASPPHEVALCYSLYSASNARGGLNGLNCYSLEPHEHISSERMETVALCYSASPGLYILEVALGLNCYSARGASPGLYSERASPGLASPALAALAPHEALAGLYCYSSERGLNASPPRGLPHEHISLYSGLCYSASPGLPHEGLYPHEGLNCYSGLNASNGLYVALCYSILESERLEILETRPLYSCYSASPGLYMETASPASPCYSGLYASPTYRSERASPGLALAASNCYSGLASNPRTHRGLALAPRASNCYSSERARGTYRPHEGLNPHEHISCYSGLASNGLYHISCYSILEPRASNARGTRPLYSCYSASPARGGLASNASPCYSGLYASPTRPSERASPGLLYSASPCYSGLYASPSERHISVALLEPRSERPRTHRPRGLYPRSERTHRCYSLEPRASNTYRPHEALACYSSERSERGLYALACYSVALMETGLYTHRTRPVALCYSASPGLYTYRARGASPCYSALAASPGLYSERASPGLGLALACYSPRSERLEALAASNSERTHRALAALASERTHRPRTHRGLNLEGLYGLNCYSASPARGPHEGLPHEGLCYSHISGLNPRLYSLYSCYSILEPRASNTRPLYSARGCYSASPGLYHISGLNASPCYSGLNASPGLYGLNASPGLALAASNCYSPRTHRHISSERTHRLETHRCYSTHRSERARGGLPHELYSCYSGLASPGLYGLALACYSILEVALLESERGLARGCYSASPGLYPHELEASPCYSSERASPGLSERASPGLLYSALACYSSERASPGLLETHRVALTYRLYSVALGLNASNLEGLNTRPTHRALAASPPHESERGLYASPVALTHRLETHRTRPMETARGPRLYSLYSMETPRSERALASERCYSVALTYRASNVALTYRTYRARGVALVALGLYGLSERILETRPLYSTHRLEGLTHRHISSERASNLYSTHRSERTHRVALLELYSVALLELYSPRASPTHRTHRTYRGLNVALLYSVALGLNVALHISCYSLEASNLYSVALHISASNTHRASNASPPHEVALTHRLEARGTHRPRGLGLYLEPRASPALAPRARGASNLEGLNLESERLEASNARGGLGLGLGLYVALILELEGLYHISTRPALAPRPRVALHISTHRHISGLYLEILEARGGLTYRILEVALGLTYRSERARGSERGLYSERLYSMETTRPALASERGLNARGALAALASERASNSERTHRGLILELYSASNLELELEASNALALETYRTHRVALARGVALALAALAVALTHRSERARGGLYILEGLYASNTRPSERASPSERLYSSERILETHRTHRILELYSGLYLYSVALILEGLNALAPRASNILEHISILEASPSERTYRASPGLASNSERLESERPHETHRLETHRMETASPGLYASPILELYSVALASNGLYTYRVALVALASNLEPHETRPSERPHEASPALAHISLYSGLNGLLYSLYSTHRLESERPHEARGGLYGLYSERALALESERHISLYSVALSERASNLETHRALAHISTHRSERTYRGLILESERALATRPALALYSTHRASPLEGLYASPSERPRLEALAPHEGLHISILELETHRARGGLYSERSERPRPRALAPRSERLELYSALALYSALAILEASNGLNTHRALAVALGLCYSILETRPTHRGLYPRLYSASNVALVALTYRGLYILEPHETYRALATHRSERPHELEASPLETYRARGASNPRLYSSERVALTHRTHRSERLEHISASNLYSTHRVALILEVALSERLYSASPGLGLNTYRLEPHELEVALARGVALLEILEPRTYRGLNGLYPRSERSERASPTYRVALVALVALLYSMETILEPRASPSERARGLEPRPRARGHISLEHISALAVALHISILEGLYLYSTHRSERALALEILELYSTRPGLSERPRTYRASPSERPRASPGLNASPLEPHETYRALAILEALAVALLYSASPLEILEARGLYSTHRASPARGSERTYRLYSVALARGSERARGASNSERTHRVALGLTYRSERLESERLYSLEGLPRGLYGLYLYSTYRHISILEILEVALGLNLEGLYASNMETSERLYSASPSERSERILELYSILETHRTHRVALSERLESERALAPRASPALALELYSILEILETHRGLASNASPHISVALLELEPHETRPLYSSERLEALALELYSGLLYSGLNPHEASNGLTHRARGGLYTYRGLILEHISMETSERASPSERALAVALASNLETHRALATYRLEGLYASNTHRTHRASPASNPHEPHELYSVALSERASNLELYSMETGLYHISASNTYRTHRPHETHRVALGLNALAARGCYSLEPHEGLYSERGLNILECYSGLYGLPRALAVALLELETYRASPGLLESERSERGLYALAASPALAALAVALILEHISALAALAARGSERTHRASPVALALAALAVALVALVALPRILELEPHELEILELELESERLEGLYVALGLYPHEALAILELETYRTHRLYSHISARGARGLEGLNSERSERPHESERALAPHEALAASNSERHISTYRSERSERARGLEGLYSERALAILEPHESERSERGLYASPASPLEGLYGLASPASPGLASPALAPRMETILETHRGLYPHESERASPASPVALPRMETVALILEALA

SEQ ID NO: 72 - DNA, 6840 bp, Homo sapiens
ccggcccagcggctctcctggcctcgcgctgcacattctctcctggcggcggcgccacctgcagtagcgttcgcccgaacatggcgacacggagcagcaggagggagtcgcgactcccgttcctattcaccctggtcgcactgctgccgcccggagctctctgcgaagtctggacgcagaggctgcacggcggcagcgcgcccttgccccaggaccggggcttcctcgtggtgcagggcgacccgcgcgagctgcggctgtgggcgcgcggggatgccaggggggcgagccgcgcggacgagaagccgctccggaggaaacggagcgctgccctgcagcccgagcccatcaaggtgtacggacaggttagtctgaatgattcccacaatcagatggtggtgcactgggctggagagaaaagcaacgtgatcgtggccttggcccgagatagcctggcattggcgaggcccaagagcagtgatgtgtacgtgtcttacgactatggaaaatcattcaagaaaatttcagacaagttaaactttggcttgggaaataggagtgaagctgttatcgcccagttctaccacagccctgcggacaacaagcggtacatctttgcagacgcttatgcccagtacctctggatcacgtttgacttctgcaacactcttcaaggcttttccatcccatttcgggcagctgatctcctcctacacagtaaggcctccaaccttctcttgggctttgacaggtcccaccccaacaagcagctgtggaagtcagatgactttggccagacctggatcatgattcaggaacatgtcaagtccttttcttggggaattgatccctatgacaaaccaaataccatctacattgaacgacacgaaccctctggctactccactgtcttccgaagtacagatttcttccagtcccgggaaaaccaggaagtgatccttgaggaagtgagagattttcagcttcgggacaagtacatgtttgctacaaaggtggtgcatctcttgggcagtgaacagcagtcttctgtccagctctgggtctcctttggccggaagcccatgagagcagcccagtttgtcacaagacatcctattaatgaatattacatcgcagatgcctccgaggaccaggtgtttgtgtgtgtcagccacagtaacaaccgcaccaatttatacatctcagaggcagaggggctgaagttctccctgtccttggagaacgtgctctattacagcccaggaggggccggcagtgacaccttggtgaggtattttgcaaatgaaccatttgctgacttccaccgagtggaaggattgcaaggagtctacattgctactctgattaatggttctatgaatgaggagaacatgagatcggtcatcacctttgacaaagggggaacctgggagtttcttcaggctccagccttcacgggatatggagagaaaatcaattgtgagctttcccagggctgttcccttcatctggctcagcgcctcagtcagctcctcaacctccagctccggagaatgcccatcctgtccaaggagtcggctccaggcctcatcatcgccactggctcagtgggaaagaacttggctagcaagacaaacgtgtacatctctagcagtgctggagccaggtggcgagaggcacttcctggacctcactactacacatggggagaccacggcggaatcatcacggccattgcccagggcatggaaaccaacgagctaaaatacagtaccaatgaaggggagacctggaaaacattcatcttctctgagaagccagtgtttgtgtatggcctcctcacagaacctggggagaagagcactgtcttcaccatctttggctcgaacaaagagaatgtccacagctggctgatcctccaggtcaatgccacggatgccttgggagttccctgcacagagaatgactacaagctgtggtcaccatctgatgagcgggggaatgagtgtttgctgggacacaagactgttttcaaacggcggaccccccatgccacatgcttcaatggagaggactttgacaggccggtggtcgtgtccaactgctcctgcacccgggaggactatgagtgtgacttcggtttcaagatgagtgaagatttgtcattagaggtttgtgttccagatccggaattttctggaaagtcatactcccctcctgtgccttgccctgtgggttctacttacaggagaacgagaggctaccggaagatttctggggacacttgtagcggaggagatgttgaagcgcgactggaaggagagctggtcccctgtcccctggcagaagagaacgagttcattctgtatgctgtgaggaaatccatctaccgctatgacctggcctcgggagccaccgagcagttgcctctcaccgggctacgggcagcagtggccctggactttgactatgagcacaactgtttgtattggtccgacctggccttggacgtcatccagcgcctctgtttgaatggaagcacagggcaagaggtgatcatcaattctggcctggagacagtagaagctttggcttttgaacccctcagccagctgctttactgggtagatgcaggcttcaaaaagattgaggtagctaatccagatggcgacttccgactcacaatcgtcaattcctctgtgcttgatcgtcccagggctctggtcctcgtgccccaagagggggtgatgttctggacagactggggagacctgaagcctgggatttatcggagcaatatggatggttctgctgcctatcacctggtgtctgaggatgtgaagtggcccaatggcatctctgtggacgaccagtggatttactggacggatgcctacctggagtgcatagagcggatcacgttcagtggccagcagcgctctgtcattctggacaacctcccgcacccctatgccattgctgtctttaagaatgaaatctactgggatgactggtcacagctcagcatattccgagcttccaaatacagtgggtcccagatggagattctggcaaaccagctcacggggctcatggacatgaagattttctacaaggggaagaacactggaagcaatgcctgtgtgcccaggccatgcagcctgctgtgcctgcccaaggccaacaacagtagaagctgcaggtgtccagaggatgtgtccagcagtgtgcttccatcaggggacctgatgtgtgactgccctcagggctatcagctcaagaacaatacctgtgtcaaagaagagaacacctgtcttcgcaaccagtatcgctgcagcaacgggaactgtatcaacagcatttggtggtgtgactttgacaacgactgtggagacatgagcgatgagagaaactgccctaccaccatctgtgacctggacacccagtttcgttgccaggagtctgggacttgtatcccactgtcctataaatgtgaccttgaggatgactgtggagacaacagtgatgaaagtcattgtgaaatgcaccagtgccggagtgacgagtacaactgcagttccggcatgtgcatccgctcctcctgggtatgtgacggggacaacgactgcagggactggtctgatgaagccaactgtaccgccatctatcacacctgtgaggcctccaacttccagtgccgaaacgggcactgcatcccccagcggtgggcgtgtgacggggatacggactgccaggatggttccgatgaggatccagtcaactgtgagaagaagtgcaatggattccgctgcccaaacggcacttgcatcccatccagcaaacattgtgatggtctgcgtgattgctctgatggctccgatgaacagcactgcgagcccctctgtacgcacttcatggactttgtgtgtaagaaccgccagcagtgcctgttccactccatggtctgtgacggaatcatccagtgccgcgacgggtccgatgaggatgcggcgtttgcaggatgctcccaagatcctgagttccacaaggtatgtgatgagttcggtttccagtgtcagaatggagtgtgcatcagtttgatttggaagtgcgacgggatggatgattgcggcgattattctgatgaagccaactgcgaaaaccccacagaagccccaaactgctcccgctacttccagtttcggtgtgagaatggccactgcatccccaacagatggaaatgtgacagggagaacgactgtggggactggtctgatgagaaggattgtggagattcacatattcttcccttctcgactcctgggccctccacgtgtctgcccaattactaccgctgcagcagtgggacctgcgtgatggacacctgggtgtgcgacgggtaccgagattgtgcagatggctctgacgaggaagcctgccccttgcttgcaaacgtcactgctgcctccactcccacccaacttgggcgatgtgaccgatttgagttcgaatgccaccaaccgaagacgtgtattcccaactggaagcgctgtgacggccaccaagattgccaggatggccgggacgaggccaattgccccacacacagcaccttgacttgcatgagcagggagttccagtgcgaggacggggaggcctgcattgtgctctcggagcgctgcgacggcttcctggactgctcggacgagagcgatgaaaaggcctgcagtgatgagttgactgtgtacaaagtacagaatcttcagtggacagctgacttctctggggatgtgactttgacctggatgaggcccaaaaaaatgccctctgcatcttgtgtatataatgtctactacagggtggttggagagagcatatggaagactctggagacccacagcaataagacaaacactgtattaaaagtcttgaaaccagataccacgtatcaggttaaagtacaggttcagtgtctcagcaaggcacacaacaccaatgactttgtgaccctgaggaccccagagggattgccagatgcccctcgaaatctccagctgtcactccccagggaagcagaaggtgtgattgtaggccactgggctcctcccatccacacccatggcctcatccgtgagtacattgtagaatacagcaggagtggttccaagatgtgggcctcccagagggctgctagtaactttacagaaatcaagaacttattggtcaacactctatacaccgtcagagtggctgcggtgactagtcgtggaataggaaactggagcgattctaaatccattaccaccataaaaggaaaagtgatcccaccaccagatatccacattgacagctatggtgaaaattatctaagcttcaccctgaccatggagagtgatatcaaggtgaatggctatgtggtgaaccttttctgggcatttgacacccacaagcaagagaggagaactttgaacttccgaggaagcatattgtcacacaaagttggcaatctgacagctcatacatcctatgagatttctgcctgggccaagactgacttgggggatagccctctggcatttgagcatgttatgaccagaggggttcgcccacctgcacctagcctcaaggccaaagccatcaaccagactgcagtggaatgtacctggaccggcccccggaatgtggtttatggtattttctatgccacgtcctttcttgacctctatcgcaacccgaagagcttgactacttcactccacaacaagacggtcattgtcagtaaggatgagcagtatttgtttctggtccgtgtagtggtaccctaccaggggccatcctctgactacgttgtagtgaagatgatcccggacagcaggcttccaccccgtcacctgcatgtggttcatacgggcaaaacctccgtggtcatcaagtgggaatcaccgtatgactctcctgaccaggacttgttgtatgcaattgcagtcaaagatctcataagaaagactgacaggagctacaaagtaaaatcccgtaacagcactgtggaatacacccttaacaagttggagcctggcgggaaataccacatcattgtccaactggggaacatgagcaaagattccagcataaaaattaccacagtttcattatcagcacctgatgccttaaaaatcataacagaaaatgatcatgttcttctgttttggaaaagcctggctttaaaggaaaagcattttaatgaaagcaggggctatgagatacacatgtttgatagtgccatgaatatcacagcttaccttgggaatactactgacaatttctttaaaatttccaacctgaagatgggtcataattacacgttcaccgtccaagcaagatgcctttttggcaaccagatctgtggggagcctgccatcctgctgtacgatgagctggggtctggtgcagatgcatctgcaacgcaggctgccagatctacggatgttgctgctgtggtggtgcccatcttattcctgatactgctgagcctgggggtggggtttgccatcctgtacacgaagcaccggaggctgcagagcagcttcaccgccttcgccaacagccactacagctccaggctggggtccgcaatcttctcctctggggatgacctgggggaagatgatgaagatgcccctatgataactggattttcagatgacgtccccatggtgatagcctgaaagagctttcctcactagaaaccaaatggtgtaaatattttatttgataaagatagttgatggtttattttaaaagatgcactttgagttgcaatatgttatttttatatgggcc

SEQ ID NO: 73 - protein, 6231 aa, Homo sapiens
METALATHRARGSERSERARGARGGLSERARGLEPRPHELEPHETHRLEVALALALELEPRPRGLYALALECYSGLVALTRPTHRGLNARGLEHISGLYGLYSERALAPRLEPRGLNASPARGGLYPHELEVALVALGLNGLYASPPRARGGLLEARGLETRPALAARGGLYASPALAARGGLYALASERARGALAASPGLLYSPRLEARGARGLYSARGSERALAALALEGLNPRGLPRILELYSVALTYRGLYGLNVALSERLEASNASPSERHISASNGLNMETVALVALHISTRPALAGLYGLLYSSERASNVALILEVALALALEALAARGASPSERLEALALEALAARGPRLYSSERSERASPVALTYRVALSERTYRASPTYRGLYLYSSERPHELYSLYSILESERASPLYSLEASNPHEGLYLEGLYASNARGSERGLALAVALILEALAGLNPHETYRHISSERPRALAASPASNLYSARGTYRILEPHEALAASPALATYRALAGLNTYRLETRPILETHRPHEASPPHECYSASNTHRLEGLNGLYPHESERILEPRPHEARGALAALAASPLELELEHISSERLYSALASERASNLELELEGLYPHEASPARGSERHISPRASNLYSGLNLETRPLYSSERASPASPPHEGLYGLNTHRTRPILEMETILEGLNGLHISVALLYSSERPHESERTRPGLYILEASPPRTYRASPLYSPRASNTHRILETYRILEGLARGHISGLPRSERGLYTYRSERTHRVALPHEARGSERTHRASPPHEPHEGLNSERARGGLASNGLNGLVALILELEGLGLVALARGASPPHEGLNLEARGASPLYSTYRMETPHEALATHRLYSVALVALHISLELEGLYSERGLGLNGLNSERSERVALGLNLETRPVALSERPHEGLYARGLYSPRMETARGALAALAGLNPHEVALTHRARGHISPRILEASNGLTYRTYRILEALAASPALASERGLASPGLNVALPHEVALCYSVALSERHISSERASNASNARGTHRASNLETYRILESERGLALAGLGLYLELYSPHESERLESERLEGLASNVALLETYRTYRSERPRGLYGLYALAGLYSERASPTHRLEVALARGTYRPHEALAASNGLPRPHEALAASPPHEHISARGVALGLGLYLEGLNGLYVALTYRILEALATHRLEILEASNGLYSERMETASNGLGLASNMETARGSERVALILETHRPHEASPLYSGLYGLYTHRTRPGLPHELEGLNALAPRALAPHETHRGLYTYRGLYGLLYSILEASNCYSGLLESERGLNGLYCYSSERLEHISLEALAGLNARGLESERGLNLELEASNLEGLNLEARGARGMETPRILELESERLYSGLSERALAPRGLYLEILEILEALATHRGLYSERVALGLYLYSASNLEALASERLYSTHRASNVALTYRILESERSERSERALAGLYALAARGTRPARGGLALALEPRGLYPRHISTYRTYRTHRTRPGLYASPHISGLYGLYILEILETHRALAILEALAGLNGLYMETGLTHRASNGLLELYSTYRSERTHRASNGLGLYGLTHRTRPLYSTHRPHEILEPHESERGLLYSPRVALPHEVALTYRGLYLELETHRGLPRGLYGLLYSSERTHRVALPHETHRILEPHEGLYSERASNLYSGLASNVALHISSERTRPLEILELEGLNVALASNALATHRASPALALEGLYVALPRCYSTHRGLASNASPTYRLYSLETRPSERPRSERASPGLARGGLYASNGLCYSLELEGLYHISLYSTHRVALPHELYSARGARGTHRPRHISALATHRCYSPHEASNGLYGLASPPHEASPARGPRVALVALVALSERASNCYSSERCYSTHRARGGLASPTYRGLCYSASPPHEGLYPHELYSMETSERGLASPLESERLEGLVALCYSVALPRASPPRGLPHESERGLYLYSSERTYRSERPRPRVALPRCYSPRVALGLYSERTHRTYRARGARGTHRARGGLYTYRARGLYSILESERGLYASPTHRCYSSERGLYGLYASPVALGLALAARGLEGLGLYGLLEVALPRCYSPRLEALAGLGLASNGLPHEILELETYRALAVALARGLYSSERILETYRARGTYRASPLEALASERGLYALATHRGLGLNLEPRLETHRGLYLEARGALAALAVALALALEASPPHEASPTYRGLHISASNCYSLETYRTRPSERASPLEALALEASPVALILEGLNARGLECYSLEASNGLYSERTHRGLYGLNGLVALILEILEASNSERGLYLEGLTHRVALGLALALEALAPHEGLPRLESERGLNLELETYRTRPVALASPALAGLYPHELYSLYSILEGLVALALAASNPRASPGLYASPPHEARGLETHRILEVALASNSERSERVALLEASPARGPRARGALALEVALLEVALPRGLNGLGLYVALMETPHETRPTHRASPTRPGLYASPLELYSPRGLYILETYRARGSERASNMETASPGLYSERALAALATYRHISLEVALSERGLASPVALLYSTRPPRASNGLYILESERVALASPASPGLNTRPILETYRTRPTHRASPALATYRLEGLCYSILEGLARGILETHRPHESERGLYGLNGLNARGSERVALILELEASPASNLEPRHISPRTYRALAILEALAVALPHELYSASNGLILETYRTRPASPASPTRPSERGLNLESERILEPHEARGALASERLYSTYRSERGLYSERGLNMETGLILELEALAASNGLNLETHRGLYLEMETASPMETLYSILEPHETYRLYSGLYLYSASNTHRGLYSERASNALACYSVALPRARGPRCYSSERLELECYSLEPRLYSALAASNASNSERARGSERCYSARGCYSPRGLASPVALSERSERSERVALLEPRSERGLYASPLEMETCYSASPCYSPRGLNGLYTYRGLNLELYSASNASNTHRCYSVALLYSGLGLASNTHRCYSLEARGASNGLNTYRARGCYSSERASNGLYASNCYSILEASNSERILETRPTRPCYSASPPHEASPASNASPCYSGLYASPMETSERASPGLARGASNCYSPRTHRTHRILECYSASPLEASPTHRGLNPHEARGCYSGLNGLSERGLYTHRCYSILEPRLESERTYRLYSCYSASPLEGLASPASPCYSGLYASPASNSERASPGLSERHISCYSGLMETHISGLNCYSARGSERASPGLTYRASNCYSSERSERGLYMETCYSILEARGSERSERTRPVALCYSASPGLYASPASNASPCYSARGASPTRPSERASPGLALAASNCYSTHRALAILETYRHISTHRCYSGLALASERASNPHEGLNCYSARGASNGLYHISCYSILEPRGLNARGTRPALACYSASPGLYASPTHRASPCYSGLNASPGLYSERASPGLASPPRVALASNCYSGLLYSLYSCYSASNGLYPHEARGCYSPRASNGLYTHRCYSILEPRSERSERLYSHISCYSASPGLYLEARGASPCYSSERASPGLYSERASPGLGLNHISCYSGLPRLECYSTHRHISPHEMETASPPHEVALCYSLYSASNARGGLNGLNCYSLEPHEHISSERMETVALCYSASPGLYILEILEGLNCYSARGASPGLYSERASPGLASPALAALAPHEALAGLYCYSSERGLNASPPRGLPHEHISLYSVALCYSASPGLPHEGLYPHEGLNCYSGLNASNGLYVALCYSILESERLEILETRPLYSCYSASPGLYMETASPASPCYSGLYASPTYRSERASPGLALAASNCYSGLASNPRTHRGLALAPRASNCYSSERARGTYRPHEGLNPHEARGCYSGLASNGLYHISCYSILEPRASNARGTRPLYSCYSASPARGGLASNASPCYSGLYASPTRPSERASPGLLYSASPCYSGLYASPSERHISILELEPRPHESERTHRPRGLYPRSERTHRCYSLEPRASNTYRTYRARGCYSSERSERGLYTHRCYSVALMETASPTHRTRPVALCYSASPGLYTYRARGASPCYSALAASPGLYSERASPGLGLALACYSPRLELEALAASNVALTHRALAALASERTHRPRTHRGLNLEGLYARGCYSASPARGPHEGLPHEGLCYSHISGLNPRLYSTHRCYSILEPRASNTRPLYSARGCYSASPGLYHISGLNASPCYSGLNASPGLYARGASPGLALAASNCYSPRTHRHISSERTHRLETHRCYSMETSERARGGLPHEGLNCYSGLASPGLYGLALACYSILEVALLESERGLARGCYSASPGLYPHELEASPCYSSERASPGLSERASPGLLYSALACYSSERASPGLLETHRVALTYRLYSVALGLNASNLEGLNTRPTHRALAASPPHESERGLYASPVALTHRLETHRTRPMETARGPRLYSLYSMETPRSERALASERCYSVALTYRASNVALTYRTYRARGVALVALGLYGLSERILETRPLYSTHRLEGLTHRHISSERASNLYSTHRASNTHRVALLELYSVALLELYSPRASPTHRTHRTYRGLNVALLYSVALGLNVALGLNCYSLESERLYSALAHISASNTHRASNASPPHEVALTHRLEARGTHRPRGLGLYLEPRASPALAPRARGASNLEGLNLESERLEPRARGGLALAGLGLYVALILEVALGLYHISTRPALAPRPRILEHISTHRHISGLYLEILEARGGLTYRILEVALGLTYRSERARGSERGLYSERLYSMETTRPALASERGLNARGALAALASERASNPHETHRGLILELYSASNLELEVALASNTHRLETYRTHRVALARGVALALAALAVALTHRSERARGGLYILEGLYASNTRPSERASPSERLYSSERILETHRTHRILELYSGLYLYSVALILEPRPRPRASPILEHISILEASPSERTYRGLYGLASNTYRLESERPHETHRLETHRMETGLSERASPILELYSVALASNGLYTYRVALVALASNLEPHETRPALAPHEASPTHRHISLYSGLNGLARGARGTHRLEASNPHEARGGLYSERILELESERHISLYSVALGLYASNLETHRALAHISTHRSERTYRGLILESERALATRPALALYSTHRASPLEGLYASPSERPRLEALAPHEGLHISVALMETTHRARGGLYVALARGPRPRALAPRSERLELYSALALYSALAILEASNGLNTHRALAVALGLCYSTHRTRPTHRGLYPRARGASNVALVALTYRGLYILEPHETYRALATHRSERPHELEASPLETYRARGASNPRLYSSERLETHRTHRSERLEHISASNLYSTHRVALILEVALSERLYSASPGLGLNTYRLEPHELEVALARGVALVALVALPRTYRGLNGLYPRSERSERASPTYRVALVALVALLYSMETILEPRASPSERARGLEPRPRARGHISLEHISVALVALHISTHRGLYLYSTHRSERVALVALILELYSTRPGLSERPRTYRASPSERPRASPGLNASPLELETYRALAILEALAVALLYSASPLEILEARGLYSTHRASPARGSERTYRLYSVALLYSSERARGASNSERTHRVALGLTYRTHRLEASNLYSLEGLPRGLYGLYLYSTYRHISILEILEVALGLNLEGLYASNMETSERLYSASPSERSERILELYSILETHRTHRVALSERLESERALAPRASPALALELYSILEILETHRGLASNASPHISVALLELEPHETRPLYSSERLEALALELYSGLLYSHISPHEASNGLSERARGGLYTYRGLILEHISMETPHEASPSERALAMETASNILETHRALATYRLEGLYASNTHRTHRASPASNPHEPHELYSILESERASNLELYSMETGLYHISASNTYRTHRPHETHRVALGLNALAARGCYSLEPHEGLYASNGLNILECYSGLYGLPRALAILELELETYRASPGLLEGLYSERGLYALAASPALASERALATHRGLNALAALAARGSERTHRASPVALALAALAVALVALVALPRILELEPHELEILELELESERLEGLYVALGLYPHEALAILELETYRTHRLYSHISARGARGLEGLNSERSERPHETHRALAPHEALAASNSERHISTYRSERSERARGLEGLYSERALAILEPHESERSERGLYASPASPLEGLYGLASPASPGLASPALAPRMETILETHRGLYPHESERASPASPVALPRMETVALILEALA

SEQ ID NO: 74 - DNA, 1039 bp, Rattus norvegicus
cccccgggctgcaggaattccgtttctagttcccggccggtgagccactccggcttttcgcggtctacttgtcccagcgtcggctctggactgtctatcgctctctgacgttcagtcccgggtcgctgcttgtgcgcgcacgccgcctcacacgacaaacttatggcggagcgcggggaactcgatctgacgggcgccaaacagaacaccggcgtgtggctggtgaaggttcctaaatatttgtcccagcaatgggcaaaagcccctggaagaggtgaagttgggaaactgaggattgccaagaatcaaggaaggactgaggtatcatttactttgaatgaggatcttgcgaatattcatgatatcggtgggaaaccagcttcagtcagtgctcctagagaacatccatttgtcttgcaaagtgttggaggacagacattaacagtgttcaccgagagctcctcagataaactgtcattggaaggaatagtggttcagagagcggaatgccgacctgctgccagtgaaaactacatgaaactaaagagattgcaaatagaagaatcttccaaacctgtaaggctctcacaacagctggacaaagttgtaaccaccaattacaagcctgtcgctaaccatcagtacaatattgaatatgaaaggaagaagaaagaagatggaaagcgagctcgggcagacaaacaacacgtcctagacatgctgttctcagcctttgagaaacatcagtactataatcttaaggacttggtggacatcacaaagcaacctgtgggatacctgaaagaaatcttgaaagaaatcggcattcagaatgtaaaaggaattcacaagaatacgtgggagctgaagccagagtacaggcattaccaaacagaggagaagagcgactgagagaagcgtgtgcaacagttacaggcagatctctgccaccacacgctgactgcctgcccaccctgacaggacaaagacaactgagtctgtctgccattcctcagtaaactgttaaagctgggactcc

SEQ ID NO: 75 - protein, 693 aa, Rattus norvegicus
METALAGLARGGLYGLLEASPLETHRGLYALALYSGLNASNTHRGLYVALTRPLEVALLYSVALPRLYSTYRLESERGLNGLNTRPALALYSALAPRGLYARGGLYGLVALGLYLYSLEARGILEALALYSASNGLNGLYARGTHRGLVALSERPHETHRLEASNGLASPLEALAASNILEHISASPILEGLYGLYLYSPRALASERVALSERALAPRARGGLHISPRPHEVALLEGLNSERVALGLYGLYGLNTHRLETHRVALPHETHRGLSERSERSERASPLYSLESERLEGLGLYILEVALVALGLNARGALAGLCYSARGPRALAALASERGLASNTYRMETLYSLELYSARGLEGLNILEGLGLSERSERLYSPRVALARGLESERGLNGLNLEASPLYSVALVALTHRTHRASNTYRLYSPRVALALAASNHISGLNTYRASNILEGLTYRGLARGLYSLYSLYSGLASPGLYLYSARGALAARGALAASPLYSGLNHISVALLEASPMETLEPHESERALAPHEGLLYSHISGLNTYRTYRASNLELYSASPLEVALASPILETHRLYSGLNPRVALGLYTYRLELYSGLILELELYSGLILEGLYILEGLNASNVALLYSGLYILEHISLYSASNTHRTRPGLLELYSPRGLTYRARGHISTYRGLNTHRGLGLLYSSERASP

SEQ ID NO: 76 - DNA, 750 bp, Homo sapiens
atggccgagcgcggggaactcgacttgaccggcgccaaacagaacacaggagtgtggctagtcaaggttcctaaatatttgtcacagcaatgggctaaagcctctggaagaggtgaagttgggaaactgcggattgccaagactcaaggaaggactgaggtgtcatttactttgaatgaggatcttgcaaatattcatgatattggtggaaaaccagcttcagtcagtgctcctagagaacatccatttgtcttgcaaagtgttggaggacagacattaacagtatttactgagagctcatcagataagctgtcattggaaggaatagtggtacaaagagctgaatgccgaccagctgccagtgaaaactacatgcgattaaaaagattgcaaatagaagagtcttccaaaccagtgaggctatcacaacagctggacaaagttgtaacaaccaattacaaacctgttgctaatcatcaatacaatatcgaatatgaaaggaaaaagaaagaagacggaaagcgagctcgagctgataaacaacatgttttagacatgctattttcagcctttgagaaacatcaatactataatcttaaggacttggtggacatcacaaaacaacctgtggtgtacctgaaggaaatcttaaaagaaattggtgttcagaatgtaaaagggatccacaaaaacacatgggagctgaagccagagtacagacactatcaaggagaagaaaagagtgactaa

SEQ ID NO: 77 - protein, 694 aa, Homo sapiens
METALAGLARGGLYGLLEASPLETHRGLYALALYSGLNASNTHRGLYVALTRPLEVALLYSVALPRLYSTYRLESERGLNGLNTRPALALYSALASERGLYARGGLYGLVALGLYLYSLEARGILEALALYSTHRGLNGLYARGTHRGLVALSERPHETHRLEASNGLASPLEALAASNILEHISASPILEGLYGLYLYSPRALASERVALSERALAPRARGGLHISPRPHEVALLEGLNSERVALGLYGLYGLNTHRLETHRVALPHETHRGLSERSERSERASPLYSLESERLEGLGLYILEVALVALGLNARGALAGLCYSARGPRALAALASERGLASNTYRMETARGLELYSARGLEGLNILEGLGLSERSERLYSPRVALARGLESERGLNGLNLEASPLYSVALVALTHRTHRASNTYRLYSPRVALALAASNHISGLNTYRASNILEGLTYRGLARGLYSLYSLYSGLASPGLYLYSARGALAARGALAASPLYSGLNHISVALLEASPMETLEPHESERALAPHEGLLYSHISGLNTYRTYRASNLELYSASPLEVALASPILETHRLYSGLNPRVALVALTYRLELYSGLILELELYSGLILEGLYVALGLNASNVALLYSGLYILEHISLYSASNTHRTRPGLLELYSPRGLTYRARGHISTYRGLNGLYGLGLLYSSERASP

SEQ ID NO: 78 - DNA, 1568 bp, Rattus norvegicus
ggacagcgcatggcggccacagaggatgacagactggcggggagcggagaaggagaacggctggatttcctgcgggaccgacacgtgcggttcttccagcgctgcctccaggtcttgccggagcggtattcttcgctggagaccagcaggctgacaattgcattttttgcactctctgggctggatatgttggactccttggatgtggtgaacaaagacgatataatagagtggatttattccttgcaggttcttcccacagaagacaggtcaaatctggatcgctgtggtttccgaggttcttcatatttgggtattccattcaacccatcaaagaatccaggcacagctcatccttatgacagtggacacatagcgatgacttacactggtctttcctgtttaattattcttggagatgatttaagccgagtagataaagaagcttgcttagcaggcttgagagcacttcagctggaagatgggagcttctgtgctgttcctgaaggcagtgagaatgacatgaggtttgtgtactgtgcttcctgcatttgctatatgctcaacaactggtcaggcatggatatgaagaaagccatcagctacattagaagaagtatgtcctatgacaatggcctggcacagggggcaggacttgagtctcatggaggatccaccttttgtggcattgcgtcactgtgcctgatgggtaaactggaagaagttttttcagagaaagaactgaaccggataaagaggtggtgcataatgaggcagcagaacgggtaccacggaagacctaacaagcctgtcgacacctgttactctttctgggtgggagcaacactaaagcttttgaaaattttccagtacactaactttgagaagaataggaattacatcttatcaactcaggatcgccttgttgggggatttgctaaatggccagacagtcatccagatgctttgcatgcgtacttcgggatctgtggcctgtcactaatggaggagagtggaatttgtaaagttcatcctgctctgaatgtaagcacacgaacttctgagcgcctccgagatctccatcaaagctggaagaccaaggactctaaacagtgctcagacaatgtccatatttccagttgactaaccctggggtaaagggtgtgtagcatacgtgtagctcaaggttaaaagccatgtgtaaccaagtgtgctcttctttaagggttagtcgtaaaagtcagaagcgtgtactgctagttcttcaggatatgctcttaggccagtgaccactgtcatggatttcaagaaaatccttgttgacgtgtggacatcagcagaactctggtatggttcttaactgttacactgtgtttctgagacctttcatggggcagatatgtttgtaggttatcttcttaaaaccctcagtacaagttctggcttacaaaatgtacgtaaaccttcaaaacaagtttacactccatatggcattgataatcttcaggtgagcatttaacgatcacttaaaaatcgctactgctgatgggaagaaatttgtttatccg

SEQ ID NO: 79 - protein, 1058 aa, Rattus norvegicus
METALAALATHRGLASPASPARGLEALAGLYSERGLYGLGLYGLARGLEASPPHELEARGASPARGHISVALARGPHEPHEGLNARGCYSLEGLNVALLEPRGLARGTYRSERSERLEGLTHRSERARGLETHRILEALAPHEPHEALALESERGLYLEASPMETLEASPSERLEASPVALVALASNLYSASPASPILEILEGLTRPILETYRSERLEGLNVALLEPRTHRGLASPARGSERASNLEASPARGCYSGLYPHEARGGLYSERSERTYRLEGLYILEPRPHEASNPRSERLYSASNPRGLYTHRALAHISPRTYRASPSERGLYHISILEALAMETTHRTYRTHRGLYLESERCYSLEILEILELEGLYASPASPLESERARGVALASPLYSGLALACYSLEALAGLYLEARGALALEGLNLEGLASPGLYSERPHECYSALAVALPRGLGLYSERGLASNASPMETARGPHEVALTYRCYSALASERCYSILECYSTYRMETLEASNASNTRPSERGLYMETASPMETLYSLYSALAILESERTYRILEARGARGSERMETSERTYRASPASNGLYLEALAGLNGLYALAGLYLEGLSERHISGLYGLYSERTHRPHECYSGLYILEALASERLECYSLEMETGLYLYSLEGLGLVALPHESERGLLYSGLLEASNARGILELYSARGTRPCYSILEMETARGGLNGLNASNGLYTYRHISGLYARGPRASNLYSPRVALASPTHRCYSTYRSERPHETRPVALGLYALATHRLELYSLELELYSILEPHEGLNTYRTHRASNPHEGLLYSASNARGASNTYRILELESERTHRGLNASPARGLEVALGLYGLYPHEALALYSTRPPRASPSERHISPRASPALALEHISALATYRPHEGLYILECYSGLYLESERLEMETGLGLSERGLYILECYSLYSVALHISPRALALEASNVALSERTHRARGTHRSERGLARGLEARGASPLEHISGLNSERTRPLYSTHRLYSASPSERLYSGLNCYSSERASPASNVALHISILESERSER

SEQ ID NO: 80 - DNA, 1969 bp, Homo sapiens
gaataaaatgaacaattcagttcctcagtcacatgagctgtgtgtcaaatgcacaacagccgtatgtggctcgtggcccctgtaccggacactcccatccctgcagagttactggacagtgctgatctagggattctgttacaaaatccatgaaagtgttcagcacaatgccgggcccatataaacgtcagtagttgttgttattataattagtcttgacccaacggcaaattcactttgagaccttagataaatcactctacctctctgagcctggtttccttgccctaaaaggatggcaaggggctgggcatggtggccactgaggatgagaggctagcagggagcggtgagggagagcggctggatttcttacgggatcggcacgtgcgatttttccagcgctgcctccaggttttgccggagcgctattcttcactcgagacaagcaggttgacaattgcattttttgcactctccgggctggatatgttggattccttagatgtggtgaacaaagatgatataatagagtggatttattccctgcaggtccttcccacagaagacagatcaaatctaaatcgctgtggtttccgaggctcttcatacctgggtattccgttcaatccatcaaaggctcctggaacagctcatccttatgatagtggccacattgcaatgacctacactggcctctcatgcttagttattcttggagacgacttaagccgagtaaataaagaagcttgcttagcgggcttgagagcccttcagctggaagatgggagtttttgtgcagtacctgaaggcagtgaaaatgacatgcgatttgtgtactgtgcttcctgtatttgctatatgctcaacaactggtcaggcatggatatgaaaaaagccatcacctatattagaaggagtatgtcctatgacaatggactggcacagggagctggacttgaatctcatggaggatcaactttttgtggcattgcctcactatgtctgatgggtaaactagaagaagttttttcagaaaaagaattgaacaggataaagaggtggtgtataatgaggcaacaaaatggttatcatggaagacctaataagcctgtagacacctgttattctttttgggtgggagcaactctgaagcttctaaaaattttccaatacactaactttgagaaaaatagaaattacatcttatcaactcaagatcgccttgtagggggatttgccaagtggccagacagtcatccagatgctttgcatgcatactttgggatctgtggcctgtcactaatggaggaaagtggaatttgtaaagttcatcctgctctgaatgtaagcacacggacttctgaacgccttctagatctccatcaaagctggaaaaccaaggactctaaacaatgctcagagaatgtacatatctccacatgactgattttagattgggagggtgggggggatttgtagcataactgtagctcaagtttaaaagccatgtataaccaagtgtgctctttttttaaaaggtagagtcttacaatcaaatctcctgctgatttcactttgggatatggtcttgagccagtaatctttatactgggtttcaagaaaatctttgttgaagtttgaaccacaactttgtcgtggttcttaaatgtttatactgtatttctaagaagttgtttgaggcaaattaactgtatgtgtgtaggttatctttttaaaaactcttcagtgcaaattgtatcttattataaaatggacacaaattttcaagtttacacttcatatagcattgataatcttcaggtgaacacttagtgatcatttaaaaagctcactgctgatcgtagaaaatttgctttaattaattaagtatctgggattattctttgaaaacagatgaccataattttttttaaagaagagtgacttattttgtcttattcttaag

SEQ ID NO: 81 - protein, 1055 aa, Homo sapiens
METVALALATHRGLASPGLARGLEALAGLYSERGLYGLGLYGLARGLEASPPHELEARGASPARGHISVALARGPHEPHEGLNARGCYSLEGLNVALLEPRGLARGTYRSERSERLEGLTHRSERARGLETHRILEALAPHEPHEALALESERGLYLEASPMETLEASPSERLEASPVALVALASNLYSASPASPILEILEGLTRPILETYRSERLEGLNVALLEPRTHRGLASPARGSERASNLEASNARGCYSGLYPHEARGGLYSERSERTYRLEGLYILEPRPHEASNPRSERLYSALAPRGLYTHRALAHISPRTYRASPSERGLYHISILEALAMETTHRTYRTHRGLYLESERCYSLEVALILELEGLYASPASPLESERARGVALASNLYSGLALACYSLEALAGLYLEARGALALEGLNLEGLASPGLYSERPHECYSALAVALPRGLGLYSERGLASNASPMETARGPHEVALTYRCYSALASERCYSILECYSTYRMETLEASNASNTRPSERGLYMETASPMETLYSLYSALAILETHRTYRILEARGARGSERMETSERTYRASPASNGLYLEALAGLNGLYALAGLYLEGLSERHISGLYGLYSERTHRPHECYSGLYILEALASERLECYSLEMETGLYLYSLEGLGLVALPHESERGLLYSGLLEASNARGILELYSARGTRPCYSILEMETARGGLNGLNASNGLYTYRHISGLYARGPRASNLYSPRVALASPTHRCYSTYRSERPHETRPVALGLYALATHRLELYSLELELYSILEPHEGLNTYRTHRASNPHEGLLYSASNARGASNTYRILELESERTHRGLNASPARGLEVALGLYGLYPHEALALYSTRPPRASPSERHISPRASPALALEHISALATYRPHEGLYILECYSGLYLESERLEMETGLGLSERGLYILECYSLYSVALHISPRALALEASNVALSERTHRARGTHRSERGLARGLELEASPLEHISGLNSERTRPLYSTHRLYSASPSERLYSGLNCYSSERGLASNVALHISILESERTHR

SEQ ID NO: 82 - DNA, 2056 bp, Mus musculus
  misc_feature (1942)..(1943): n is a, c, g, or t
gctaaactatcccgcaaagatttttctttcctccctaaaccctcctttttgctctccttttctatacccttaactgcaaacaaaccattaaacgacccctctcctgggcctccgacggcaggagtccgcggacctcccaggccgacagccctccctctacccgcgaggttccgggccgggcgagagggcgcgagcacagccgaggacatggaggtgactgcggaccagccgcgctgggtgagccaccatcaccccgcggtcctcaacggtcagcacccagacacgcaccacccgggcctcggccattcgtacatggaagctcagtatccgctgacggaagaggtggacgtactttttaacatcgatggtcaaggcaaccacgtcccgtcctactacggaaactccgtcagggctacggtgcagaggtatcctccgacccaccacgggagccaggtatgccgcccgcctctgctgcacggatctctgccctggctggatggcggcaaagccctgagcagccaccacaccgcctcgccctggaacctcagccccttctccaagacgtccatccaccacggctctccggggcctctgtccgtttaccctccggcttcatcctcttctctggcggccggccactccagtcctcatctcttcaccttcccgcccaccccgccgaaagacgtctccccagacccgtcgctgtccaccccgggatccgccgggtcggccaggcaagatgagaaagagtgcctcaagtatcaggtgcagctgccagatagcatgaagctggagacgtctcactctcgaggcagcatgaccaccctgggtggggcctcatcctcagcccaccaccccattaccacctatccgccctatgtgcccgagtacagctctggactcttcccacccagcagcctgctgggaggatcccctaccgggttcggatgtaagtcgaggcccaaggcacgatccagcacagaaggcagggagtgtgtgaactgcggggcaacctctaccccactgtggcggcgagatggtaccgggcactacctttgcaatgcctgcggactctaccataaaatgaatgggcagaaccggccccttatcaagcccaagcgaaggctgtcggcagcaaggagagcagggacatcctgcgcgaactgtcagaccaccaccaccaccctctggaggaggaacgctaatggggacccggtctgcaatgcctgtgggctgtactacaagcttcataatattaacagacccctgactatgaagaaagaaggcatccagacccgaaaccggaagatgtctagcaaatcgaaaaagtgcaaaaaggtgcatgacgcgctggaggacttccccaagagcagctccttcaacccggccgctctctccagacacatgtcatccctgagccacatctctcccttcagccactccagccacatgctgaccacaccgacgcccatgcatccgccctccggcctctccttcggacctcaccacccttccagcatggtcaccgccatgggttagagaggcagagccctgctccacatgcgtgaggagtctccaagtgtgcgaagagttcctccgaccccttctacttgcgtttttcgcaggagcagtatcatgaagcccgaaagcgacagatctgtgtttttgaaggcagaaagcaaaatgtttgcttcttttttcaaaggagctcgaggtggtgtctgcattccaaccactgaatccggatcccatttgtgaataagccattcagactcatattccctatttaacagggtctctagtgctgtgaaaaaaatattgctgaacattgcatataacttatattgtaagaaatactgtacatttgaggaagactttattgtacctggatagctgtaagaaaggcatgaaggacgccaagagttttaaggaatataggggnnttaaagtatggagatacagaagaaaccactaagtctgatgtccaaatgggcacactgtcagttttgtttcccttcagttgtttgatgcatttaaaaaaaaaaaaaagaaagaa

SEQ ID NO: 83 - protein, 1234 aa, Mus musculus
METGLVALTHRALAASPGLNPRARGTRPVALSERHISHISHISPRALAVALLEASNGLYGLNHISPRASPTHRHISHISPRGLYLEGLYHISSERTYRMETGLALAGLNTYRPRLETHRGLGLVALASPVALLEPHEASNILEASPGLYGLNGLYASNHISVALPRSERTYRTYRGLYASNSERVALARGALATHRVALGLNARGTYRPRPRTHRHISHISGLYSERGLNVALCYSARGPRPRLELEHISGLYSERLEPRTRPLEASPGLYGLYLYSALALESERSERHISHISTHRALASERPRTRPASNLESERPRPHESERLYSTHRSERILEHISHISGLYSERPRGLYPRLESERVALTYRPRPRALASERSERSERSERLEALAALAGLYHISSERSERPRHISLEPHETHRPHEPRPRTHRPRPRLYSASPVALSERPRASPPRSERLESERTHRPRGLYSERALAGLYSERALAARGGLNASPGLLYSGLCYSLELYSTYRGLNVALGLNLEPRASPSERMETLYSLEGLTHRSERHISSERARGGLYSERMETTHRTHRLEGLYGLYALASERSERSERALAHISHISPRILETHRTHRTYRPRPRTYRVALPRGLTYRSERSERGLYLEPHEPRPRSERSERLELEGLYGLYSERPRTHRGLYPHEGLYCYSLYSSERARGPRLYSALAARGSERSERTHRGLGLYARGGLCYSVALASNCYSGLYALATHRSERTHRPRLETRPARGARGASPGLYTHRGLYHISTYRLECYSASNALACYSGLYLETYRHISLYSMETASNGLYGLNASNARGPRLEILELYSPRLYSARGARGLESERALAALAARGARGALAGLYTHRSERCYSALAASNCYSGLNTHRTHRTHRTHRTHRLETRPARGARGASNALAASNGLYASPPRVALCYSASNALACYSGLYLETYRTYRLYSLEHISASNILEASNARGPRLETHRMETLYSLYSGLGLYILEGLNTHRARGASNARGLYSMETSERSERLYSSERLYSLYSCYSLYSLYSVALHISASPALALEGLASPPHEPRLYSSERSERSERPHEASNPRALAALALESERARGHISMETSERSERLESERHISILESERPRPHESERHISSERSERHISMETLETHRTHRPRTHRPRMETHISPRPRSERGLYLESERPHEGLYPRHISHISPRSERSERMETVALTHRALAMETGLY

SEQ ID NO: 84 - DNA, 2365 bp, Homo sapiens
tcccagccttcccatccccccaccgaaagcaaatcattcaacgacccccgaccctccgacggcaggagccccccgacctcccaggcggaccgcccttccctccccgcgcgggttccgggcccggcgagagggcgcgacgacagccgaggccatggaggtgacggcggaccagccgcgctgggtgagccaccaccaccccgccgtgctcaacgggcagcacccggacacgcaccacccgggcctcagccactcctacatggacgcggcgcagtacccgctgccggaggaggtggatgtgctttttaacatcgacggtcaaggcaaccacgtcccgccctactacggaaactcggtcagggccacggtgcagaggtaccctccgacccaccacgggagccaggtgtgccgcccgcctctgcttcatggatccctaccctggctggacggcggcaaagccctgggcagccaccacaccgcctccccctggaatctcagccccttctccaagacgtccatccaccacggctccccggggcccctctccgtctaccccccggcctcgtcctcctccttgtcggggggccacgccagcccgcacctcttcaccttcccgcccaccccgccgaaggacgtctccccggacccatcgctgtccaccccaggctcggccggctcggcccggcaggacgagaaagagtgcctcaagtaccaggtgcccctgcccgacagcatgaagctggagtcgtcccactcccgtggcagcatgaccgccctgggtggagcctcctcgtcgacccaccaccccatcaccacctacccgccctacgtgcccgagtacagctccggactcttcccccccagcagcctgctgggcggctcccccaccggcttcggatgcaagtccaggcccaaggcccggtccagcacaggcagggagtgtgtgaactgtggggcaacctcgaccccactgtggcggcgagatggcacgggacactacctgtgcaacgcctgcgggctctatcacaaaatgaacggacagaaccggcccctcattaagcccaagcgaaggctgtctgcagccaggagagcagggacgtcctgtgcgaactgtcagaccaccacaaccacactctggaggaggaatgccaatggggaccctgtctgcaatgcctgtgggctctactacaagcttcacaatattaacagacccctgactatgaagaaggaaggcatccagaccagaaaccgaaaaatgtctagcaaatccaaaaagtgcaaaaaagtgcatgactcactggaggacttccccaagaacagctcgtttaacccggccgccctctccagacacatgtcctccctgagccacatctcgcccttcagccactccagccacatgctgaccacgcccacgccgatgcacccgccatccagcctgtcctttggaccacaccacccctccagcatggtcaccgccatgggttagagccctgctcgatgctcacagggcccccagcgagagtccctgcagtccctttcgacttgcatttttgcaggagcagtatcatgaagcctaaacgcgatggatatatgtttttgaaggcagaaagcaaaattatgtttgccactttgcaaaggagctcactgtggtgtctgtgttccaaccactgaatctggaccccatctgtgaataagccattctgactcatatcccctatttaacagggtctctagtgctgtgaaaaaaaaaaatcctgaacattgcatataacttatattgtaagaaatactgtacaatgactttattgcatctgggtagctgtaaggcatgaaggatgccaagaagtttaaggaatatgggagaaatagtgtggaaattaagaagaaactaggtctgatattcaaatggacaaactgccagttttgtttcctttcactggccacagttgtttgatgcattaaaagaaaataaaaaaaagaaaaaagagaaaagaaaaaaaaagaaaaaagttgtaggcgaatcatttgttcaaagctgttggccctctgcaaaggaaataccagttctgggcaatcagtgttaccgttcaccagttgccattgagggtttcagagagcctttttctaggcctacatgctttgtgaacaagtccctgtaattgttgtttgtatgtataattcaaagcaccaaaataagaaaagatgtagatttatttcatcatattatacagaccgaactgttgtataaatttatttactgctagtcttaagaactgctttctttcgtttgtttgtttcaatattttccttctctctcaattttcggttgaataaactagattacattcagttggcaaaaaaaaaaaaa

SEQ ID NO: 85 - protein, 1233 aa, Homo sapiens
METGLVALTHRALAASPGLNPRARGTRPVALSERHISHISHISPRALAVALLEASNGLYGLNHISPRASPTHRHISHISPRGLYLESERHISSERTYRMETASPALAALAGLNTYRPRLEPRGLGLVALASPVALLEPHEASNILEASPGLYGLNGLYASNHISVALPRPRTYRTYRGLYASNSERVALARGALATHRVALGLNARGTYRPRPRTHRHISHISGLYSERGLNVALCYSARGPRPRLELEHISGLYSERLEPRTRPLEASPGLYGLYLYSALALEGLYSERHISHISTHRALASERPRTRPASNLESERPRPHESERLYSTHRSERILEHISHISGLYSERPRGLYPRLESERVALTYRPRPRALASERSERSERSERLESERGLYGLYHISALASERPRHISLEPHETHRPHEPRPRTHRPRPRLYSASPVALSERPRASPPRSERLESERTHRPRGLYSERALAGLYSERALAARGGLNASPGLLYSGLCYSLELYSTYRGLNVALPRLEPRASPSERMETLYSLEGLSERSERHISSERARGGLYSERMETTHRALALEGLYGLYALASERSERSERTHRHISHISPRILETHRTHRTYRPRPRTYRVALPRGLTYRSERSERGLYLEPHEPRPRSERSERLELEGLYGLYSERPRTHRGLYPHEGLYCYSLYSSERARGPRLYSALAARGSERSERTHRGLYARGGLCYSVALASNCYSGLYALATHRSERTHRPRLETRPARGARGASPGLYTHRGLYHISTYRLECYSASNALACYSGLYLETYRHISLYSMETASNGLYGLNASNARGPRLEILELYSPRLYSARGARGLESERALAALAARGARGALAGLYTHRSERCYSALAASNCYSGLNTHRTHRTHRTHRTHRLETRPARGARGASNALAASNGLYASPPRVALCYSASNALACYSGLYLETYRTYRLYSLEHISASNILEASNARGPRLETHRMETLYSLYSGLGLYILEGLNTHRARGASNARGLYSMETSERSERLYSSERLYSLYSCYSLYSLYSVALHISASPSERLEGLASPPHEPRLYSASNSERSERPHEASNPRALAALALESERARGHISMETSERSERLESERHISILESERPRPHESERHISSERSERHISMETLETHRTHRPRTHRPRMETHISPRPRSERSERLESERPHEGLYPRHISHISPRSERSERMETVALTHRALAMETGLY

SEQ ID NO: 86 - DNA, 664 bp, Rattus norvegicus
tttgctaagctatcccgcaaagaattttctttcctccctaaaccctctcctttgctcaccttttctatccacttcactacaaacaaacctttaagcgactccctctcctgggcctccgacggcaggactccgcggacctcccaggccgacagccctccctctacccgcgaggttccgggcccggcgagagggcgcgagcacagcccgggacatggaggtgactacggaccagccgcgctgggtgagccaccatcacccggcggtcctcaacgggcagcacccagacacgcaccacccgggcctcggccattcgtacatggacccggcacagtaccccctgacggaagaggtggacgtactttttaacatcgatggtcaaggcaaccacgtcccgtcctactacggaaactcggtcagggctacggtgcagaggtatcctccgacccaccacgggagccaggtatgccgcccgcctctgctgcacggatctctgccctggctggatggcggcaaagccctgagcagccaccacaccgcctcgccctggaacctcagccccttctccaagacgtccatccaccacggctccccggggcctctgtccgtctaccctccggcttcatcctcttctctggctgcgggccactccagtccgcatctcttc

SEQ ID NO: 87 - DNA, 3277 bp, Homo sapiens
gccggcgcttcccggccggtgtcgctccgcggcgggccatggccaacgtctctaagaaggtgtcctggtccggccgggaccgggacgacgaggaggcggcgccgctgctgcggaggacggcgcggcccggcggggggacgccgctgctgaacggggctgggcccggggctgcgcgccagtcaccacgttctgcgcttttccgagtcggacatatgagcagcgtggagctggatgatgaacttttggacccggatatggaccctccacatcccttccccaaggagatcccacacaacgagaagctcctgtccctcaagtatgagagcttggactatgacaacagtgagaaccagctgttcctggaggaggagcggcggatcaatcacacggccttccggacggtggagatcaagcgctgggtcatctgcgccctcattgggatcctcacgggcctcgtggcctgcttcattgacatcgtggtggaaaacctggctggcctcaagtacagggtcatcaagggcaatatcgacaagttcacagagaagggcggactgtccttctccctgttgctgtgggccacgctgaacgccgccttcgtgctcgtgggctctgtgattgtggctttcatagagccggtggctgctggcagcggaatcccccagatcaagtgcttcctcaacggggtgaagatcccccacgtggtgcggctcaagacgttggtgatcaaagtgtccggtgtgatcctgtccgtggtcgggggcctggccgtgggaaaggaagggccgatgatccactcaggttcagtgattgccgccgggatctctcagggaaggtcaacgtcactgaaacgagatttcaagatcttcgagtacttccgcagagacacagagaagcgggacttcgtctccgcaggggctgcggccggagtgtcagcggcgtttggagcccccgtgggtggggtcctgttcagcttggaggagggtgcgtccttctggaaccagttcctgacctggaggatcttctttgcttccatgatctccacgttcaccctgaattttgttctgagcatttaccacgggaacatgtgggacctgtccagcccaggcctcatcaacttcggaaggtttgactcggagaaaatggcctacacgatccacgagatcccggtcttcatcgccatgggcgtggtgggcggtgtgcttggagctgtgttcaatgccttgaactactggctgaccatgtttcgaatcaggtacatccaccggccctgcctgcaggtgattgaggccgtgctggtggccgccgtcacggccacagttgccttcgtgctgatctactcgtcgcgggattgccagcccctgcaggggggctccatgtcctacccgctgcagctcttttgtgcagatggcgagtacaactccatggctgcggccttcttcaacaccccggagaagagcgtggtgagcctcttccacgacccgccaggctcctacaaccccctgaccctcggcctgttcacgctggtctacttcttcctggcctgctggacctacgggctcacggtgtctgccggggtcttcatcccgtccctgctcatcggggctgcctggggccggctctttgggatctccctgtcctacctcacgggggcggcgatctgggcggaccccggcaaatacgccctgatgggagctgctgcccagctgggcgggattgtgcggatgacactgagcctgaccgtcatcatgatggaggccaccagcaacgtgacctacggcttccccatcatgctggtgctcatgaccgccaagatcgtgggcgacgtcttcattgagggcctgtacgacatgcacattcagctgcagagtgtgcccttcctgcactgggaggccccggtcacctcacactcactcactgccagggaggtgatgagcacaccagtgacctgcctgaggcggcgtgagaaggtcggcgtcattgtggacgtgctgagcgacacggcgtccaatcacaacggcttccccgtggtggagcatgccgatgacacccagcctgcccggctccagggcctgatcctgcgctcccagctcatcgttctcctaaagcacaaggtgtttgtggagcggtccaacctgggcctggtacagcggcgcctgaggctgaaggacttccgagacgcctacccgcgcttcccacccatccagtccatccacgtgtcccaggacgagcgggagtgcaccatggacctctccgagttcatgaacccctccccctacacggtgccccaggaggcgtcgctcccacgggtgttcaagctgttccgggccctgggcctgcggcacctggtggtggtggacaaccgcaatcaggttgtcgggttggtgaccaggaaggacctcgccaggtaccgcctgggaaagagaggcttggaggagctctcgctggcccagacgtgaggcccagccctgcccataatgggcactggcgctggcaccccggcccttctgcatttcctcccggagtcactggtttctcggcccaaaccatgctccccagcagtggcaatggcgagcaccctgcagctgggcgggcaggcggcaggcgcggaactgaccctctcgcgggactgaccctgttgtgggcagtggtctccccccttggcgcctccttgcgcaggcccagcctccactctcctcgtctaggtttctttacctccagggatcagctgtgtgtgtgtgacctccctaccgggctatcggcctcttgggagccagcggcagggccggcacctgcgtgcctgtgcccgtgtgcgtgagacagagcccttgcccctgctgctgccccgagggctgccctgccctggaagggcccctctgcctccacaccagtggagtcttcgagacttgggagctgcttggcctcattttcagccatgagcagacggcctgtggtccctgggcctgaggcacggactcgtagcaccagggtttggaggctgcgaccgccccggagagcagcttcacactggcgccacagaggagccccacgtgcactccccggcctgcatccggcttgggtacacaggcccagaggactggggtgactcacgggccctgtgctgtgatgttgagagctgagaaaaacctccaaggccctgagccccatgcccagccctgccttggtcccccaatccccagagcttggagtctgggccccacacccagccctgccttggtccctgagcctcaaagcgtggaattgctgccctgtggacact

SEQ ID NO: 88 - protein, 2244 aa, Homo sapiens
METALAASNVALSERLYSLYSVALSERTRPSERGLYARGASPARGASPASPGLGLALAALAPRLELEARGARGTHRALAARGPRGLYGLYGLYTHRPRLELEASNGLYALAGLYPRGLYALAALAARGGLNSERPRARGSERALALEPHEARGVALGLYHISMETSERSERVALGLLEASPASPGLLELEASPPRASPMETASPPRPRHISPRPHEPRLYSGLILEPRHISASNGLLYSLELESERLELYSTYRGLSERLEASPTYRASPASNSERGLASNGLNLEPHELEGLGLGLARGARGILEASNHISTHRALAPHEARGTHRVALGLILELYSARGTRPVALILECYSALALEILEGLYILELETHRGLYLEVALALACYSPHEILEASPILEVALVALGLASNLEALAGLYLELYSTYRARGVALILELYSGLYASNILEASPLYSPHETHRGLLYSGLYGLYLESERPHESERLELELETRPALATHRLEASNALAALAPHEVALLEVALGLYSERVALILEVALALAPHEILEGLPRVALALAALAGLYSERGLYILEPRGLNILELYSCYSPHELEASNGLYVALLYSILEPRHISVALVALARGLELYSTHRLEVALILELYSVALSERGLYVALILELESERVALVALGLYGLYLEALAVALGLYLYSGLGLYPRMETILEHISSERGLYSERVALILEALAALAGLYILESERGLNGLYARGSERTHRSERLELYSARGASPPHELYSILEPHEGLTYRPHEARGARGASPTHRGLLYSARGASPPHEVALSERALAGLYALAALAALAGLYVALSERALAALAPHEGLYALAPRVALGLYGLYVALLEPHESERLEGLGLGLYALASERPHETRPASNGLNPHELETHRTRPARGILEPHEPHEALASERMETILESERTHRPHETHRLEASNPHEVALLESERILETYRHISGLYASNMETTRPASPLESERSERPRGLYLEILEASNPHEGLYARGPHEASPSERGLLYSMETALATYRTHRILEHISGLILEPRVALPHEILEALAMETGLYVALVALGLYGLYVALLEGLYALAVALPHEASNALALEASNTYRTRPLETHRMETPHEARGILEARGTYRILEHISARGPRCYSLEGLNVALILEGLALAVALLEVALALAALAVALTHRALATHRVALALAPHEVALLEILETYRSERSERARGASPCYSGLNPRLEGLNGLYGLYSERMETSERTYRPRLEGLNLEPHECYSALAASPGLYGLTYRASNSERMETALAALAALAPHEPHEASNTHRPRGLLYSSERVALVALSERLEPHEHISASPPRPRGLYSERTYRASNPRLETHRLEGLYLEPHETHRLEVALTYRPHEPHELEALACYSTRPTHRTYRGLYLETHRVALSERALAGLYVALPHEILEPRSERLELEILEGLYALAALATRPGLYARGLEPHEGLYILESERLESERTYRLETHRGLYALAALAILETRPALAASPPRGLYLYSTYRALALEMETGLYALAALAALAGLNLEGLYGLYILEVALARGMETTHRLESERLETHRVALILEMETMETGLALATHRSERASNVALTHRTYRGLYPHEPRILEMETLEVALLEMETTHRALALYSILEVALGLYASPVALPHEILEGLGLYLETYRASPMETHISILEGLNLEGLNSERVALPRPHELEHISTRPGLALAPRVALTHRSERHISSERLETHRALAARGGLVALMETSERTHRPRVALTHRCYSLEARGARGARGGLLYSVALGLYVALILEVALASPVALLESERASPTHRALASERASNHISASNGLYPHEPRVALVALGLHISALAASPASPTHRGLNPRALAARGLEGLNGLYLEILELEARGSERGLNLEILEVALLELELYSHISLYSVALPHEVALGLARGSERASNLEGLYLEVALGLNARGARGLEARGLELYSASPPHEARGASPALATYRPRARGPHEPRPRILEGLNSERILEHISVALSERGLNASPGLARGGLCYSTHRMETASPLESERGLPHEMETASNPRSERPRTYRTHRVALPRGLNGLALASERLEPRARGVALPHELYSLEPHEARGALALEGLYLEARGHISLEVALVALVALASPASNARGASNGLNVALVALGLYLEVALTHRARGLYSASPLEALAARGTYRARGLEGLYLYSARGGLYLEGLGLLESERLEALAGLNTHR

SEQ ID NO: 89 - DNA, 2750 bp, Rattus norvegicus
ggggcgcgggtcacgggaacgctgccgggctgccggctgttcttgtggagtttggtcctcagtgggccatggccaacgtttctaagaaagtgtcttggtccggccgagatcgcgatgacgaggagggggcgccgctgcttcgaaggacggggcaacctgacgaggagacgccgctgctgaacggagccgggccgggcgcgcgccagtctcattctgcacttttccgaattggacagatgaacaacgtggagctggatgatgaactcctggacccggaagtggaccctcctcacaccttccccaaggagattccacacaacgagaagctcctctccctcaagtatgagagcctggactatgacaatagtgagaatcagctcttcctggaggaggaaagacgaatcaaccacacggctttccggacagtggagatcaagcgctgggttatctgtgccctcattggaatcctcacaggcctagtagcctgcttcattgacattgtagtggagaacctggcaggcctcaagtaccgagtcatcaaggacaacatcgacaagttcacagagaagggcggcctgtccttctccctcctgctgtgggccacactgaactctgccttcgtgctcgtggggtctgtgattgtggccttcatagagccagttgctgctggcagcggaatccctcagatcaagtgcttcctcaatggggtgaagatcccccacgtggtgcggctcaagacgctggtgatcaaggtgtctggcgtgattctgtctgtggtagggggactggctgtgggaaaggaagggccaatgatccactcaggatccgtgattgctgcagggatttcacagggaaggtcgacgtcactcaagcgagattttaagatctttgaatatttccgcagagatacagagaagcgggattttgtctcagctggagctgcagctggagtgtctgctgcgtttggagcacctgtgggtggggtcctgttcagcctggaagagggcgcctccttctggaatcagttcctgacatggagaattttctttgcttccatgatttcgacctttacactgaattttgttctgagcatctaccatggaaacatgtgggacctgtccagccctggcctcataaattttggaagattcgactcagagaaaatggcctacacaatccatgagattcctgtcttcatcgccatgggtgtggtgggtggcattcttggagccgtgttcaatgccttgaattactggctaactatgtttcgaatcaggtacatccaccggccctgcctccaagtgattgaggccatgctggtggcagctgtcacagccacagttgcatttgtcttgatttactcgtctcgagattgccagcccctgcaggggagctccatgtcctacccactccagctcttctgtgcagatggcgaatacaactcaatggccgcagccttctttaacacccctgagaagagcgtcgtcagcctgttccacgacccaccaggctcctataatcccatgactctcggcctgttcaccctggtctacttcttcctggcctgctggacctatggcctcacagtatctgctggtgtcttcatcccatccctgctcattggggctgcctggggccgactctttggcatctccatgtcctacctcacaggagcagcgatctgggcagatccgggtaaatacgccctgatgggagctgctgctcagcttggtgggatcgtgaggatgacccttagcctgacagtcatcatgatggaggccaccagcaacgtgacctacggttttcccatcatgttggtgctgatgactgccaagattgtgggtgatgtcttcattgagggcctctatgacatgcacatccagctgcaaagtgtgcccttcctacactgggaagccccggtcacctcacattcgctcactgccagggaagtaatgagcacgcctgtgacctgcctgaggaggagagagaaggttggcatcatcgtggatgtcctaagtgacacagcgtctaatcacaatgggttccctgtggtggaggatgtaggagacacccagccagccagactccaaggcctaatcctgcgttcccagctcatcgtgctcctgaagcacaaggtgtttgtggagaggtccaacatgggtttggtgcagcggagactgaggctgaaagactttcgcgatgcctacccacgcttccccccaatccagtccatccacgtatcccaggatgagcgggagtgcaccatggacctttctgagttcatgaacccttctccctacactgtgccacaggaggcatctcttcctcgagtgttcaagctgttccgggctctgggcctgaggcacctggtcgtagtagacaaccacaatcaggtggtcgggctggtgaccaggaaggacctagcaagataccgcctaggaaaaggaggcctagaagagctttcactggcccagacgtgagggctggcccccacccttgggcagcggcaccccggcccctctgcacctcctcccagggtccctggtctcagccaaagccttgccctgggcagtgcagcaacaggagcaaatgccctccccgggcttggctggtgtggggcccagaccctttgtcctgggcagttggtttacatcatcagcatttccctattccctgaacctgcagtcctcagacttgtcccactcctgggtcccttctcccaggatgtaaagtgtgttttcacacccctt

SEQ ID NO: 90 - protein, 2240 aa, Rattus norvegicus
METALAASNVALSERLYSLYSVALSERTRPSERGLYARGASPARGASPASPGLGLGLYALAPRLELEARGARGTHRGLYGLNPRASPGLGLTHRPRLELEASNGLYALAGLYPRGLYALAARGGLNSERHISSERALALEPHEARGILEGLYGLNMETASNASNVALGLLEASPASPGLLELEASPPRGLVALASPPRPRHISTHRPHEPRLYSGLILEPRHISASNGLLYSLELESERLELYSTYRGLSERLEASPTYRASPASNSERGLASNGLNLEPHELEGLGLGLARGARGILEASNHISTHRALAPHEARGTHRVALGLILELYSARGTRPVALILECYSALALEILEGLYILELETHRGLYLEVALALACYSPHEILEASPILEVALVALGLASNLEALAGLYLELYSTYRARGVALILELYSASPASNILEASPLYSPHETHRGLLYSGLYGLYLESERPHESERLELELETRPALATHRLEASNSERALAPHEVALLEVALGLYSERVALILEVALALAPHEILEGLPRVALALAALAGLYSERGLYILEPRGLNILELYSCYSPHELEASNGLYVALLYSILEPRHISVALVALARGLELYSTHRLEVALILELYSVALSERGLYVALILELESERVALVALGLYGLYLEALAVALGLYLYSGLGLYPRMETILEHISSERGLYSERVALILEALAALAGLYILESERGLNGLYARGSERTHRSERLELYSARGASPPHELYSILEPHEGLTYRPHEARGARGASPTHRGLLYSARGASPPHEVALSERALAGLYALAALAALAGLYVALSERALAALAPHEGLYALAPRVALGLYGLYVALLEPHESERLEGLGLGLYALASERPHETRPASNGLNPHELETHRTRPARGILEPHEPHEALASERMETILESERTHRPHETHRLEASNPHEVALLESERILETYRHISGLYASNMETTRPASPLESERSERPRGLYLEILEASNPHEGLYARGPHEASPSERGLLYSMETALATYRTHRILEHISGLILEPRVALPHEILEALAMETGLYVALVALGLYGLYILELEGLYALAVALPHEASNALALEASNTYRTRPLETHRMETPHEARGILEARGTYRILEHISARGPRCYSLEGLNVALILEGLALAMETLEVALALAALAVALTHRALATHRVALALAPHEVALLEILETYRSERSERARGASPCYSGLNPRLEGLNGLYSERSERMETSERTYRPRLEGLNLEPHECYSALAASPGLYGLTYRASNSERMETALAALAALAPHEPHEASNTHRPRGLLYSSERVALVALSERLEPHEHISASPPRPRGLYSERTYRASNPRMETTHRLEGLYLEPHETHRLEVALTYRPHEPHELEALACYSTRPTHRTYRGLYLETHRVALSERALAGLYVALPHEILEPRSERLELEILEGLYALAALATRPGLYARGLEPHEGLYILESERMETSERTYRLETHRGLYALAALAILETRPALAASPPRGLYLYSTYRALALEMETGLYALAALAALAGLNLEGLYGLYILEVALARGMETTHRLESERLETHRVALILEMETMETGLALATHRSERASNVALTHRTYRGLYPHEPRILEMETLEVALLEMETTHRALALYSILEVALGLYASPVALPHEILEGLGLYLETYRASPMETHISILEGLNLEGLNSERVALPRPHELEHISTRPGLALAPRVALTHRSERHISSERLETHRALAARGGLVALMETSERTHRPRVALTHRCYSLEARGARGARGGLLYSVALGLYILEILEVALASPVALLESERASPTHRALASERASNHISASNGLYPHEPRVALVALGLASPVALGLYASPTHRGLNPRALAARGLEGLNGLYLEILELEARGSERGLNLEILEVALLELELYSHISLYSVALPHEVALGLARGSERASNMETGLYLEVALGLNARGARGLEARGLELYSASPPHEARGASPALATYRPRARGPHEPRPRILEGLNSERILEHISVALSERGLNASPGLARGGLCYSTHRMETASPLESERGLPHEMETASNPRSERPRTYRTHRVALPRGLNGLALASERLEPRARGVALPHELYSLEPHEARGALALEGLYLEARGHISLEVALVALVALASPASNHISASNGLNVALVALGLYLEVALTHRARGLYSASPLEALAARGTYRARGLEGLYLYSGLYGLYLEGLGLLESERLEALAGLNTHR

SEQ ID NO: 91 - DNA, 1761 bp, Mus musculus
tgggttatatcttgctacccgttgatttctttctcagcatgacttccatgctctgttggaaggcttagccctgtgtcagatacttgagggattagcaggattgtgtgagagatgctcacttcaatgcctgtacttagaggtgaccgtggaatagcagccatgggccaatgggggaatctggccagaataggattggccaaagtttcccactgcaatctcaaggcctctgactctttcctctcctgcagccagccaggctccaaggcttgatcctgcgttcccagcttatcgttctcttgaagcataaggtacacccagccgcccttgggtgggagtgtcctgggcaccgtccttcacagtggcagacacataactagctgccgccttcaggtgtttgtggagaggtccaacatgggtttggtgcagcggcgactgaggctgaaggacttccgcgatgcctatccacgcttccccccaatccagtccatccatgtatcccaagatgagcgtgaatgcaccatggacctttctgaattcatgaacccttctccctacactgtgcctcaggtacttacagacccagaggagttggaagcagggctggggtatggtttgatgccttataaactttgaaaaggtggtaaggagcctctggaatcttgtggagtaattgctgccaggcagaggaggccttcagggatcgtgcaagtagagcttgcgtcctgaggtggccatctaaccagaatatattagggacagcctgagagaaccccattagcattacacaggtccttagagtcaggcatggaggggaagagacagctcagtacccttgaaatgcttggtttgggagtttgaatctcttcccatgctgggtaaagcgggctaaaggtggctgattactttgcaggaggcatctcttcctcgagtgttcaagctcttccgggctctgggcctgaggcacctggtagtagtagacaaccacaatcaggtgagactgctgtctgtcctgctggagattacgggagctggttcacactctacttcctatattcttgctaggttgtgggtggacattgggtcttgtctgtctcaggacagtaagcctgggtcctagcctattactgtacacctacttggaactaatatgtggagtatgctatcacatggagtagaagttctgtagaccctatggggactctgtgacctggtattgttcttgcaggtggtcgggctggtgaccaggaaggacctagcaagataccgcctaggaaagggaggcctagaagagctttcgctggcccagacgtgagggctggcccccagccttggacatgcagtaccccagcccctctgcacctcctcccagggtccctgatctcagccaaagccttgccccctaggcagtgcagcaacaggagcaaatgccctccctagcttggctggtgtgggggccagaccctttgtcctgggcagttggtttcagtcatcagcactttccctattccctgaccctccaggcctcagacttgccccactcctggttccttctcccaggatgaagtgtgtgttatcacaccccttgtggctcacttctgagagccaatagagtgtgtgtgagaaagacagacgtgagctactacttactgctgtctctgctcagactctgagcccttctcaccctgtgtctgcattgctcacacagccaggggcttcagtagcagggcatggggagctatacagcctggagcaggctctgtc

SEQ ID NO: 92 - protein, 2239 aa, Mus musculus
METALAASNVALSERLYSLYSVALSERTRPSERGLYARGASPARGASPASPGLGLGLYALAPRLELEARGARGTHRGLYGLNPRASPGLGLTHRPRLELEASNGLYALAGLYPRGLYALAARGGLNSERHISSERALALEPHEARGILEGLYGLNMETASNASNVALGLLEASPASPGLLELEASPPRGLVALASPPRPRHISTHRPHEPRLYSGLILEPRHISASNGLLYSLELESERLELYSTYRGLSERLEASPTYRASPASNSERGLASNGLNLEPHELEGLGLGLARGARGILEASNHISTHRALAPHEARGTHRVALGLILELYSARGTRPVALILECYSALALEILEGLYILELETHRGLYLEVALALACYSPHEILEASPILEVALVALGLASNLEALAGLYLELYSTYRARGVALILELYSASPASNILEASPLYSPHETHRGLLYSGLYGLYLESERPHESERLELELETRPALATHRLEASNSERALAPHEVALLEVALGLYSERVALILEVALALAPHEILEGLPRVALALAALAGLYSERGLYILEPRGLNILELYSCYSPHELEASNGLYVALLYSILEPRHISVALVALARGLELYSTHRLEVALILELYSVALSERGLYVALILELESERVALVALGLYGLYLEALAVALGLYLYSGLGLYPRMETILEHISSERGLYSERVALILEALAALAGLYILESERGLNGLYARGSERTHRSERLELYSARGASPPHELYSILEPHEGLTYRPHEARGARGASPTHRGLLYSARGASPPHEVALSERALAGLYALAALAALAGLYVALSERALAALAPHEGLYALAPRVALGLYGLYVALLEPHESERLEGLGLGLYALASERPHETRPASNGLNPHELETHRTRPARGILEPHEPHEALASERMETILESERTHRPHETHRLEASNPHEVALLESERILETYRHISGLYASNMETTRPASPLESERSERPRGLYLEILEASNPHEGLYARGPHEASPSERGLLYSMETALATYRTHRILEHISGLILEPRVALPHEILEALAMETGLYVALVALGLYGLYILELEGLYALAVALPHEASNALALEASNTYRTRPLETHRMETPHEARGILEARGTYRILEHISARGPRCYSLEGLNVALILEGLALAMETLEVALALAALAVALTHRALATHRVALALAPHEVALLEILETYRSERSERARGASPCYSGLNPRLEGLNGLYSERSERMETSERTYRPRLEGLNLEPHECYSALAASPGLYGLTYRASNSERMETALAALAALAPHEPHEASNTHRPRGLLYSSERVALVALSERLEPHEHISASPPRPRGLYSERTYRASNPRMETTHRLEGLYLEPHETHRLEVALTYRPHEPHELEALACYSTRPTHRTYRGLYLETHRVALSERALAGLYVALPHEILEPRSERLELEILEGLYALAALATRPGLYARGLEPHEGLYILESERLESERTYRLETHRGLYALAALAILETRPALAASPPRGLYLYSTYRALALEMETGLYALAALAALAGLNLEGLYGLYILEVALARGMETTHRLESERLETHRVALILEMETMETGLALATHRSERASNVALTHRTYRGLYPHEPRILEMETLEVALLEMETTHRALALYSILEVALGLYASPVALPHEILEGLGLYLETYRASPMETHISILEGLNLEGLNSERVALPRPHELEHISTRPGLALAPRVALTHRSERHISSERLETHRALAARGGLVALMETSERTHRPRVALTHRCYSLEARGARGARGGLLYSVALGLYILEILEVALASPVALLESERASPTHRALASERASNHISASNGLYPHEPRVALVALGLASPVALGLYASPTHRGLNPRALAARGLEGLNGLYLEILELEARGSERGLNLEILEVALLELELYSHISLYSVALPHEVALGLARGSERASNMETGLYLEVALGLNARGARGLEARGLELYSASPPHEARGASPALATYRPRARGPHEPRPRILEGLNSERILEHISVALSERGLNASPGLARGGLCYSTHRMETASPLESERGLPHEMETASNPRSERPRTYRTHRVALPRGLNGLALASERLEPRARGVALPHELYSLEPHEARGALALEGLYLEARGHISLEVALVALVALASPASNHISASNGLNVALVALGLYLEVALTHRARGLYSASPLEALAARGTYRARGLEGLYLYSGLYGLYLEGLGLLESERLEALAGLNTHR

SEQ ID NO: 93 - DNA, 2495 bp, Rattus norvegicus
attgcctaccccgggtggagaccgtgctcgtccggccctcttgcctcacgttctgcagctctgcagctccgcaatcctacaccatggcggacagccgggacccagccagcgaccagatgaagcagtggaaggagcagcgggcccctcagaaacccgatgtcctgaccaccggaggcgggaacccaataggagataaacttaatatcatgactgcggggccccgagggcccctcctcgttcaagatgtggttttcaccgacgagatggcacactttgacagagagcggattcctgagagagtggtacatgcaaagggagcaggtgcttttggatactttgaggtcacccacgatattaccagatactccaaggcaaaggtgtttgagcatattgggaagaggactcctattgccgtccgattctccacagtcgctggagagtcaggctcagctgacacagttcgtgaccctcgtgggtttgcagtgaaattctacactgaagatggtaactgggacctcgtgggaaacaacacccctattttcttcatcagggatgccatgttgtttccatcctttatccatagccagaagagaaacccacaaactcacctgaaggaccctgacatggtctgggacttctggagtctttgtccagagtctctccatcaggttactttcttgttcagcgaccgagggattccagatggacatcggcacatgaatggctatggctcacacaccttcaagctggttaatgcgaatggagaggcagtgtactgcaagttccattacaagactgaccagggcatcaaaaacttgcctgttgaagaggcaggaagacttgcacaggaagacccggattatggcctccgagatcttttcaatgccatcgccagtggcaattacccatcctggactttttacatccaggtcatgactttcaaggaggcagaaaccttcccatttaatccatttgacctgaccaaggtttggcctcacaaggactaccctcttataccagttggcaaactggtcttaaacagaaatcctgctaattattttgctgaagttgaacagatggcttttgacccaagcaacatgccccctggcattgagcccagcccggacaagatgctccagggccgcctttttgcttacccagacactcaccgccaccgcctgggaccaaactatctgcagatacctgtgaactgtccctaccgtgctcgcgtggccaactaccagcgcgatggccccatgtgcatgcatgacaaccagggtggtgctcccaactactaccccaacagcttcagcgcaccagagcagcagggctcggccctggagcaccatagccagtgctctgcagatgtgaagcgcttcaacagtgctaatgaagacaacgtcactcaggtgcggacattctatacgaaggtgttgaatgaggaggagaggaaacgcctgtgtgagaacattgccaaccacctgaaagatgctcagcttttcattcagaggaaagcggtcaagaatttcactgacgtccaccctgactacggggcccgagtccaggctcttctggaccagtacaactcccagaagcctaagaatgcaattcacacctacgtacaggccggctctcacatagctgccaagggaaaagctaacctgtaaagcacgggtgctcagcctcctcagcctgcactgaggagatccctcatgaagcagggcacaagcctcaccagtaatcatcgctggatggagtctcccctgctgaagcgcagactcacgctgacgtctttaaaacgataatccaagcttctagagtgaatgatagccatgcttttgatgacatttcccgagggggaaattaaagattagggcttagcaatcacttaacagaaacatggatctgcttaggacttctgtttggattattcatttaaaatgattacaagaaaggttttctagccagaaacatgatttgattagatatgatatatgataaaatcttggtgattttactatagtcttatgttacctcacagcctggtatatatacaacacacacacacacacacacacacacacaccaaaacacacatacactatacacacacacacacacacacactaaaacacacatacacaacacacacatacactacacacacagaacacacaacacaaacatacacacataggcacacacacacacacacacacacacacacacacacacacacacacacatgaatgaagggattataaagatggcccacccagaatttttttttatttttctaaggtccttataagaaaaaccatacttggatcatgtcttccaaaaataactttagcactgttgaaacttaatgtttattcctgtgtagttgattggattccttttccccttgaaattatgtttatgctgatacacagtgatttcacatagggtgatttgtatttgcttacatttttacaataaaatgatcttcatgg

SEQ ID NO: 94 - protein, 1486 aa, Rattus norvegicus
METALAASPSERARGASPPRALASERASPGLNMETLYSGLNTRPLYSGLGLNARGALAPRGLNLYSPRASPVALLETHRTHRGLYGLYGLYASNPRILEGLYASPLYSLEASNILEMETTHRALAGLYPRARGGLYPRLELEVALGLNASPVALVALPHETHRASPGLMETALAHISPHEASPARGGLARGILEPRGLARGVALVALHISALALYSGLYALAGLYALAPHEGLYTYRPHEGLVALTHRHISASPILETHRARGTYRSERLYSALALYSVALPHEGLHISILEGLYLYSARGTHRPRILEALAVALARGPHESERTHRVALALAGLYGLSERGLYSERALAASPTHRVALARGASPPRARGGLYPHEALAVALLYSPHETYRTHRGLASPGLYASNTRPASPLEVALGLYASNASNTHRPRILEPHEPHEILEARGASPALAMETLEPHEPRSERPHEILEHISSERGLNLYSARGASNPRGLNTHRHISLELYSASPPRASPMETVALTRPASPPHETRPSERLECYSPRGLSERLEHISGLNVALTHRPHELEPHESERASPARGGLYILEPRASPGLYHISARGHISMETASNGLYTYRGLYSERHISTHRPHELYSLEVALASNALAASNGLYGLALAVALTYRCYSLYSPHEHISTYRLYSTHRASPGLNGLYILELYSASNLEPRVALGLGLALAGLYARGLEALAGLNGLASPPRASPTYRGLYLEARGASPLEPHEASNALAILEALASERGLYASNTYRPRSERTRPTHRPHETYRILEGLNVALMETTHRPHELYSGLALAGLTHRPHEPRPHEASNPRPHEASPLETHRLYSVALTRPPRHISLYSASPTYRPRLEILEPRVALGLYLYSLEVALLEASNARGASNPRALAASNTYRPHEALAGLVALGLGLNMETALAPHEASPPRSERASNMETPRPRGLYILEGLPRSERPRASPLYSMETLEGLNGLYARGLEPHEALATYRPRASPTHRHISARGHISARGLEGLYPRASNTYRLEGLNILEPRVALASNCYSPRTYRARGALAARGVALALAASNTYRGLNARGASPGLYPRMETCYSMETHISASPASNGLNGLYGLYALAPRASNTYRTYRPRASNSERPHESERALAPRGLGLNGLNGLYSERALALEGLHISHISSERGLNCYSSERALAASPVALLYSARGPHEASNSERALAASNGLASPASNVALTHRGLNVALARGTHRPHETYRTHRLYSVALLEASNGLGLGLARGLYSARGLECYSGLASNILEALAASNHISLELYSASPALAGLNLEPHEILEGLNARGLYSALAVALLYSASNPHETHRASPVALHISPRASPTYRGLYALAARGVALGLNALALELEASPGLNTYRASNSERGLNLYSPRLYSASNALAILEHISTHRTYRVALGLNALAGLYSERHISILEALAALALYSGLYLYSALAASNLE

SEQ ID NO: 95 - DNA, 2423 bp, Mus musculus
attgccttctccgggtggagaccagaccgctgcgtccgtccctgctgtctcacgttccgcagctctgcagctccgcaatcctacaccatgtcggacagtcgggacccagccagcgaccagatgaagcagtggaaggagcagcgggcctcgcagagacctgatgtcctgaccaccggaggcgggaacccaataggagataaacttaatatcatgaccgcggggtcccgagggcccctcctcgttcaggatgtggttttcactgacgagatggcacactttgacagagagcggattcctgagagagtggtacacgcaaaaggagcaggtgcttttggatactttgaggtcacccacgatatcaccagatactccaagggaaaggtgtttgagcatattggaaagaggacccctattgccgttcggttctccacagtcgctggagagtcaggctcagctgacacagttcgtgaccctcgggggtttgcagtgaaattttacactgaagatggtaactgggatcttgtgggaaacaacacccctattttcttcatcagggatgccatattgtttccatcctttatccatagccagaagagaaacccacagactcacctgaaggatcctgacatggtctgggacttctggagtcttcgtcccgagtctctccatcaggtttctttcttgttcagtgaccgagggattcccgatggtcaccggcacatgaatggctatggatcacacaccttcaagttggttaatgcagatggagaggcagtctattgcaagttccattacaagaccgaccagggcatcaaaaacttgcctgttggagaggcaggaaggcttgctcaggaagatccggattatggcctccgagatcttttcaatgccatcgccaatggcaattacccgtcctggacgttttacatccaggtcatgacttttaaggaggcagaaactttcccatttaatccatttgatctgaccaaggtttggcctcacaaggactaccctcttataccagttggcaaagtggttttaaacaaaaatccagttaattactttgctgaagttgaacagatggcttttgacccaagcaatatgccccctggcatcgagcccagccctgacaaaaagcttcagggccgcctttttgcctacccggacactcaccgccaccgcctgggacccaactatctgcagatacctgtgaactgtccctaccgcgctcgagtggccaactaccagcgtgatggccccatgtgcatgcatgacaaccagggtggtgcccccaactattaccccaacagcttcagcgcaccagagcagcagcgctcagccctggagcacagcgtccagtgcgctgtagatgtgaaacgcttcaacagtgctaatgaagacaatgtcactcaggtgcggacattctacacaaaggtgttgaatgaggaggagaggaaacgcctgtgtgagaacattgccggccacctgaaggacgctcagcttttcattcagaagaaagcggtcaagaatttcactgacgtccaccctgactatggggcccgcatccaggctcttctggacaagtacaacgctgagaagcctaagaacgcaattcacacctacacgcaggccggctctcacatggctgcgaagggaaaagctaacctgtaactccggtgctcagcctccgctgaggagacctctcgtgaagccgagcctgaggatcacctgtaatcaacgctggatggattctcccccgccggagcgcagactcacgctgatgactttaaaacgataatccgggcttctagagtgaatgataaccatgcttttgatgccgtttcctgaagggaaatgaaaggttagggcttagcaatcatttaacagaaacatggatctaataggacttctgtttggattattcatttaaatgactacatttaaaatgattacaagaaaggtgttctagccagaaacatgacttgattagacaagataaaaatcttggcgagaatagtgtattctcctattacctcatggtctggtatatatacaatacaacacacataccacacacacacacacatgcaatacacacactacacacacatacacacactcacacacactcatacacacacatgaagagatgataaagatggcccactcagaattttttttttatttttctaaggtccttataagcaaaaccatacttgcatcatgtcttccaaaagtaactttagcactgttgaaacttaatgtttattcctgtgctgtgcggtgctgtgctgtgctgtgctgtgcagctaatcagattcttgttttttcccacttggattatgttgatgctaatacgcagtgatttcacataggatgatttgtacttgcttacatttttacaataaaatgatctacatgga

SEQ ID NO: 96 - protein, 1489 aa, Mus musculus
METSERASPSERARGASPPRALASERASPGLNMETLYSGLNTRPLYSGLGLNARGALASERGLNARGPRASPVALLETHRTHRGLYGLYGLYASNPRILEGLYASPLYSLEASNILEMETTHRALAGLYSERARGGLYPRLELEVALGLNASPVALVALPHETHRASPGLMETALAHISPHEASPARGGLARGILEPRGLARGVALVALHISALALYSGLYALAGLYALAPHEGLYTYRPHEGLVALTHRHISASPILETHRARGTYRSERLYSGLYLYSVALPHEGLHISILEGLYLYSARGTHRPRILEALAVALARGPHESERTHRVALALAGLYGLSERGLYSERALAASPTHRVALARGASPPRARGGLYPHEALAVALLYSPHETYRTHRGLASPGLYASNTRPASPLEVALGLYASNASNTHRPRILEPHEPHEILEARGASPALAILELEPHEPRSERPHEILEHISSERGLNLYSARGASNPRGLNTHRHISLELYSASPPRASPMETVALTRPASPPHETRPSERLEARGPRGLSERLEHISGLNVALSERPHELEPHESERASPARGGLYILEPRASPGLYHISARGHISMETASNGLYTYRGLYSERHISTHRPHELYSLEVALASNALAASPGLYGLALAVALTYRCYSLYSPHEHISTYRLYSTHRASPGLNGLYILELYSASNLEPRVALGLYGLALAGLYARGLEALAGLNGLASPPRASPTYRGLYLEARGASPLEPHEASNALAILEALAASNGLYASNTYRPRSERTRPTHRPHETYRILEGLNVALMETTHRPHELYSGLALAGLTHRPHEPRPHEASNPRPHEASPLETHRLYSVALTRPPRHISLYSASPTYRPRLEILEPRVALGLYLYSVALVALLEASNLYSASNPRVALASNTYRPHEALAGLVALGLGLNMETALAPHEASPPRSERASNMETPRPRGLYILEGLPRSERPRASPLYSLYSLEGLNGLYARGLEPHEALATYRPRASPTHRHISARGHISARGLEGLYPRASNTYRLEGLNILEPRVALASNCYSPRTYRARGALAARGVALALAASNTYRGLNARGASPGLYPRMETCYSMETHISASPASNGLNGLYGLYALAPRASNTYRTYRPRASNSERPHESERALAPRGLGLNGLNARGSERALALEGLHISSERVALGLNCYSALAVALASPVALLYSARGPHEASNSERALAASNGLASPASNVALTHRGLNVALARGTHRPHETYRTHRLYSVALLEASNGLGLGLARGLYSARGLECYSGLASNILEALAGLYHISLELYSASPALAGLNLEPHEILEGLNLYSLYSALAVALLYSASNPHETHRASPVALHISPRASPTYRGLYALAARGILEGLNALALELEASPLYSTYRASNALAGLLYSPRLYSASNALAILEHISTHRTYRTHRGLNALAGLYSERHISMETALAALALYSGLYLYSALAASNLE

SEQ ID NO: 97 - DNA, 2279 bp, Homo sapiens
tgcctgctgagggtggagacccacgagccgaggcctcctgcagtgttctgcacagcaaaccgcacgctatggctgacagccgggatcccgccagcgaccagatgcagcactggaaggagcagcgggccgcgcagaaagctgatgtcctgaccactggagctggtaacccagtaggagacaaacttaatgttattacagtagggccccgtgggccccttcttgttcaggatgtggttttcactgatgaaatggctcattttgaccgagagagaattcctgagagagttgtgcatgctaaaggagcaggggcctttggctactttgaggtcacacatgacattaccaaatactccaaggcaaaggtatttgagcatattggaaagaagactcccatcgcagttcggttctccactgttgctggagaatcgggttcagctgacacagttcgggaccctcgtgggtttgcagtgaaattttacacagaagatggtaactgggatctcgttggaaataacacccccattttcttcatcagggatcccatattgtttccatcttttatccacagccaaaagagaaatcctcagacacatctgaaggatccggacatggtctgggacttctggagcctacgtcctgagtctctgcatcaggtttctttcttgttcagtgatcgggggattccagatggacatcgccacatgaatggatatggatcacatactttcaagctggttaatgcaaatggggaggcagtttattgcaaattccattataagactgaccagggcatcaaaaacctttctgttgaagatgcggcgagactttcccaggaagatcctgactatggcatccgggatctttttaacgccattgccacaggaaagtacccctcctggactttttacatccaggtcatgacatttaatcaggcagaaacttttccatttaatccattcgatctcaccaaggtttggcctcacaaggactaccctctcatcccagttggtaaactggtcttaaaccggaatccagttaattactttgctgaggttgaacagatagccttcgacccaagcaacatgccacctggcattgaggccagtcctgacaaaatgcttcagggccgcctttttgcctatcctgacactcaccgccatcgcctgggacccaattatcttcatatacctgtgaactgtccctaccgtgctcgagtggccaactaccagcgtgatggcccgatgtgcatgcaggacaatcagggtggtgctccaaattactaccccaacagctttggtgctccggaacaacagccttctgccctggagcacagcatccaatattctggagaagtgcggagattcaacactgccaatgatgataacgttactcaggtgcgggcattctatgtgaacgtgctgaatgaggaacagaggaaacgtctgtgtgagaacattgccggccacctgaaggatgcacaaattttcatccagaagaaagcggtcaagaacttcactgaggtccaccctgactacgggagccacatccaggctcttctggacaagtacaatgctgagaagcctaagaatgcgattcacacctttgtgcagtccggatctcacttggcggcaagggagaaggcaaatctgtgaggccggggccctgcacctgtgcagcgaagcttagcgttcatccgtgtaacccgctcatcactggatgaagattctcctgtgctagatgtgcaaatgcaagctagtggcttcaaaatagagaatcccactttctatagcagattgtgtaacaattttaatgctatttccccaggggaaaatgaaggttaggatttaacagtcatttaaaaaaaaaatttgttttgacggatgattggattattcatttaaaatgattagaaggcaagtttctagctagaaatatgattttatttgacaaaatttgttgaaattatgtatgtttacatatcacctcatggcctattatattaaaatatggctataaatatataaaaagaaaagataaagatgatctactcagaaatttttatttttctaaggttctcataggaaaagtacatttaatacagcagtgtcatcagaagataacttgagcaccgtcatggcttaatgtttattcctgataataattgatcaaattcatttttttcactggagttacattaatgttaattcagcactgatttcacaacagatcaatttgtaattgcttacatttttacaataaataatctgtacgtaagaaca

SEQ ID NO: 98 - protein, 1489 aa, Homo sapiens
METALAASPSERARGASPPRALASERASPGLNMETGLNHISTRPLYSGLGLNARGALAALAGLNLYSALAASPVALLETHRTHRGLYALAGLYASNPRVALGLYASPLYSLEASNVALILETHRVALGLYPRARGGLYPRLELEVALGLNASPVALVALPHETHRASPGLMETALAHISPHEASPARGGLARGILEPRGLARGVALVALHISALALYSGLYALAGLYALAPHEGLYTYRPHEGLVALTHRHISASPILETHRLYSTYRSERLYSALALYSVALPHEGLHISILEGLYLYSLYSTHRPRILEALAVALARGPHESERTHRVALALAGLYGLSERGLYSERALAASPTHRVALARGASPPRARGGLYPHEALAVALLYSPHETYRTHRGLASPGLYASNTRPASPLEVALGLYASNASNTHRPRILEPHEPHEILEARGASPPRILELEPHEPRSERPHEILEHISSERGLNLYSARGASNPRGLNTHRHISLELYSASPPRASPMETVALTRPASPPHETRPSERLEARGPRGLSERLEHISGLNVALSERPHELEPHESERASPARGGLYILEPRASPGLYHISARGHISMETASNGLYTYRGLYSERHISTHRPHELYSLEVALASNALAASNGLYGLALAVALTYRCYSLYSPHEHISTYRLYSTHRASPGLNGLYILELYSASNLESERVALGLASPALAALAARGLESERGLNGLASPPRASPTYRGLYILEARGASPLEPHEASNALAILEALATHRGLYLYSTYRPRSERTRPTHRPHETYRILEGLNVALMETTHRPHEASNGLNALAGLTHRPHEPRPHEASNPRPHEASPLETHRLYSVALTRPPRHISLYSASPTYRPRLEILEPRVALGLYLYSLEVALLEASNARGASNPRVALASNTYRPHEALAGLVALGLGLNILEALAPHEASPPRSERASNMETPRPRGLYILEGLALASERPRASPLYSMETLEGLNGLYARGLEPHEALATYRPRASPTHRHISARGHISARGLEGLYPRASNTYRLEHISILEPRVALASNCYSPRTYRARGALAARGVALALAASNTYRGLNARGASPGLYPRMETCYSMETGLNASPASNGLNGLYGLYALAPRASNTYRTYRPRASNSERPHEGLYALAPRGLGLNGLNPRSERALALEGLHISSERILEGLNTYRSERGLYGLVALARGARGPHEASNTHRALAASNASPASPASNVALTHRGLNVALARGALAPHETYRVALASNVALLEASNGLGLGLNARGLYSARGLECYSGLASNILEALAGLYHISLELYSASPALAGLNILEPHEILEGLNLYSLYSALAVALLYSASNPHETHRGLVALHISPRASPTYRGLYSERHISILEGLNALALELEASPLYSTYRASNALAGLLYSPRLYSASNALAILEHISTHRPHEVALGLNSERGLYSERHISLEALAALAARGGLLYSALAASNLE

SEQ ID NO: 99 - DNA, 978 bp, Rattus norvegicus
atggcgagcagcagcggctccaaggccgaatttatcgtcggtgggaaatacaaactggtgcggaagatcggatctggttccttcggggacatttatctagcgatcaacatcaccaatggcgaggaagtggcagtgaaactagaatcccagaaggccaggcatccccagttgctgtacgagagcaaactgtataagattcttcaaggtggggttggcatccctcacatacggtggtatgggcaaggaaaagactataatgtgctagtcatggatcttctgggacccagcctcgaagacctcttcaatttctgttcaagaaggttcactatgaagactgtacttatgttagctgaccagatgatcagtagaattgaatatgtgcatacaaagaattttatacacagagacattaaaccagataacttcctaatgggtattgggcgtcactgtaataagttattccttattgattttggtttggccaaaaagtacagagacaacaggacaaggcaacacataccatacagggaagataaaaacctcactggcactgcccggtatgccagcatcaatgcacatcttggcattgagcagagtcgccgagatgacatggaatctttaggatatgttttgatgtattttaatagaaccagtctgccatggcaagggctaaaggctgcaacaaagaaacaaaaatatgaaaagattagtgaaaagaagatgtccactcctgttgaagttttgtgtaaggggtttcctgcagaatttgccatgtacttaaattactgtcgtgggctgcgctttgaggaagctccggattacatgtatctgaggcagctgttccgcatcctcttcaggaccctgaaccaccagtatgactacacgtttgattggacgatgttaaagcagaaagcagcccagcaggcagcctcttccagtgggcagggtcagcaggcccaaacccccacaggtttctaa

SEQ ID NO: 100 - protein, 917 aa, Rattus norvegicus
METALASERSERSERGLYSERLYSALAGLPHEILEVALGLYGLYLYSTYRLYSLEVALARGLYSILEGLYSERGLYSERPHEGLYASPILETYRLEALAILEASNILETHRASNGLYGLGLVALALAVALLYSLEGLSERGLNLYSALAARGHISPRGLNLELETYRGLSERLYSLETYRLYSILELEGLNGLYGLYVALGLYILEPRHISILEARGTRPTYRGLYGLNGLYLYSASPTYRASNVALLEVALMETASPLELEGLYPRSERLEGLASPLEPHEASNPHECYSSERARGARGPHETHRMETLYSTHRVALLEMETLEALAASPGLNMETILESERARGILEGLTYRVALHISTHRLYSASNPHEILEHISARGASPILELYSPRASPASNPHELEMETGLYILEGLYARGHISCYSASNLYSLEPHELEILEASPPHEGLYLEALALYSLYSTYRARGASPASNARGTHRARGGLNHISILEPRTYRARGGLASPLYSASNLETHRGLYTHRALAARGTYRALASERILEASNALAHISLEGLYILEGLGLNSERARGARGASPASPMETGLSERLEGLYTYRVALLEMETTYRPHEASNARGTHRSERLEPRTRPGLNGLYLELYSALAALATHRLYSLYSGLNLYSTYRGLLYSILESERGLLYSLYSMETSERTHRPRVALGLVALLECYSLYSGLYPHEPRALAGLPHEALAMETTYRLEASNTYRCYSARGGLYLEARGPHEGLGLALAPRASPTYRMETTYRLEARGGLNLEPHEARGILELEPHEARGTHRLEASNHISGLNTYRASPTYRTHRPHEASPTRPTHRMETLELYSGLNLYSALAALAGLNGLNALAALASERSERSERGLYGLNGLYGLNGLNALAGLNTHRPRTHRGLYPHE

SEQ ID NO: 101 - DNA, 1259 bp, Homo sapiens
ccgcctccgtgttccgtttcctgccgccctcctctcgtagccttgcctagtgtggagccccaggcctccgtcctcttcccagaggtgtcgaggcttggccccagcctccatcttcgtctctcaggatggcgagtagcagcggctccaaggctgaattcattgtcggtgggaaatataaactggtacggaagatcgggtctggctccttcggggacatctatttggcgatcaacatcaccaacggcgaggaagtggcactgaagctagaatctcagaaggccaggcatccccagttgctgtacgagagcaagctctataagattcttcaaggtggggttggcatcccccacatacggtggtatggtcaggaaaaagactacaatgtactagtcatggatcttctgggacctagcctcgaagacctcttcaatttctgttcaagaaggttcacaatgaaaactgtacttatgttagctgaccagatgatcagtagaattgaatatgtgcatacaaagaattttatacacagagacattaaaccagataacttcctaatgggtattgggcgtcactgtaataagttattccttattgattttggtttggccaaaaagtacagagacaacaggacaaggcaacacataccatacagagaagataaaaacctcactggcactgcccgatatgctagcatcaatgcacatcttggtattgagcagagtcgccgagatgacatggaatcattaggatatgttttgatgtattttaatagaaccagcctgccatggcaagggctaaaggctgcaacaaagaaacaaaaatatgaaaagattagtgaaaagaagatgtccacgcctgttgaagttttatgtaaggggtttcctgcagaatttgcgatgtacttaaactattgtcgtgggctacgctttgaggaagccccagattacatgtatctgaggcagctattccgcattcttttcaggaccctgaaccatcaatatgactacacatttgattggacaatgttaaagcagaaagcagcacagcaggcagcctcttcaagtgggcagggtcagcaggcccaaacccccacaggcaagcaaactgacaaatccaagagtaacatgaaaggtttctaatttctaagcatgaattgaggaacagaagaagcagacgagatgatcggagcagcatttgtttctccccaaatctagaaattttagttcatatgtacactagccagtggttgtggacaacca

SEQ ID NO: 102 - protein, 951 aa, Homo sapiens
METALASERSERSERGLYSERLYSALAGLPHEILEVALGLYGLYLYSTYRLYSLEVALARGLYSILEGLYSERGLYSERPHEGLYASPILETYRLEALAILEASNILETHRASNGLYGLGLVALALALELYSLEGLSERGLNLYSALAARGHISPRGLNLELETYRGLSERLYSLETYRLYSILELEGLNGLYGLYVALGLYILEPRHISILEARGTRPTYRGLYGLNGLLYSASPTYRASNVALLEVALMETASPLELEGLYPRSERLEGLASPLEPHEASNPHECYSSERARGARGPHETHRMETLYSTHRVALLEMETLEALAASPGLNMETILESERARGILEGLTYRVALHISTHRLYSASNPHEILEHISARGASPILELYSPRASPASNPHELEMETGLYILEGLYARGHISCYSASNLYSLEPHELEILEASPPHEGLYLEALALYSLYSTYRARGASPASNARGTHRARGGLNHISILEPRTYRARGGLASPLYSASNLETHRGLYTHRALAARGTYRALASERILEASNALAHISLEGLYILEGLGLNSERARGARGASPASPMETGLSERLEGLYTYRVALLEMETTYRPHEASNARGTHRSERLEPRTRPGLNGLYLELYSALAALATHRLYSLYSGLNLYSTYRGLLYSILESERGLLYSLYSMETSERTHRPRVALGLVALLECYSLYSGLYPHEPRALAGLPHEALAMETTYRLEASNTYRCYSARGGLYLEARGPHEGLGLALAPRASPTYRMETTYRLEARGGLNLEPHEARGILELEPHEARGTHRLEASNHISGLNTYRASPTYRTHRPHEASPTRPTHRMETLELYSGLNLYSALAALAGLNGLNALAALASERSERSERGLYGLNGLYGLNGLNALAGLNTHRPRTHRGLYLYSGLNTHRASPLYSSERLYSSERASNMETLYSGLYPHE

SEQ ID NO: 103 - DNA, 1058 bp, Mus musculus
  misc_feature (18)..(18): n is a, c, g, or t
  misc_feature (20)..(20): n is a, c, g, or t
  misc_feature (61)..(61): n is a, c, g, or t
  misc_feature (1057)..(1057): n is a, c, g, or t
tggcccyysrrgscaagnantcggcacgaggcggcacgagggccgatcgcccggtgcatangcgcagggtctccgggtagtcatggcgtccccatctcggaggctgcagactaagccggtcattacttgtttgaaaagcgttctcttgatctacactttcatcttttggatcactggtgttatccttcttgccgttggcatttggggcaaggtgagcctggaaaattatttttccctcttaaatgagaaggccaccaatgtgccttttgtgctcattggcacaggcactgtcattattctcttgggcacctttggttgtttcgctacctgtcgaacctccgcctggatgctgaaactgtacgcgatgtttctgacactcatttttttggtcgaactagttgccgccattgttggatttgttttcagacatgagattaagaacagctttaaaagtaactatgaaaacgctctgaaggagtacaactccacaggagactatagaagtgaagctgtagacaagatccaaagtacgttgcattgttgcggtgtcaccaattacggagattggaaaggtacgaactattactcagaaacaggatttcccaagagctgctgtaaactggagggctgttatccacagagagatgcagataaagtcaacgaagarggttgtttcataaaggtaatgacaactatagagtcagaaatgggagtcgttgctggaatttcttttggagttgcttgctttcagctaattggaatctttcttgcctactgcctgtctcgtgccataacgaataaccagtatgagatagtataatcactacacacgggctcatatctcctcagttttaaggttacctttgtgagttataacagcgcctggatggagactgacatctgcttagcctgaaaagctacaccagtaggctgattcaatcaagatacttgtgtattgtattctgtgtccactttctgtcctattcttacacccctgtatctctgaaacactggaagtgctagtaaattgtaaatgaaataaaaaaaaaaaaaaaana

SEQ ID NO: 104 - protein, 692 aa, Mus musculus
METALASERPRSERARGARGLEGLNTHRLYSPRVALILETHRCYSLELYSSERVALLELEILETYRTHRPHEILEPHETRPILETHRGLYVALILELELEALAVALGLYILETRPGLYLYSVALSERLEGLASNTYRPHESERLELEASNGLLYSALATHRASNVALPRPHEVALLEILEGLYTHRGLYTHRVALILEILELELEGLYTHRPHEGLYCYSPHEALATHRCYSARGTHRSERALATRPMETLELYSLETYRALAMETPHELETHRLEILEPHELEVALGLLEVALALAALAILEVALGLYPHEVALPHEARGHISGLILELYSASNSERPHELYSSERASNTYRGLASNALALELYSGLTYRASNSERTHRGLYASPTYRARGSERGLALAVALASPLYSILEGLNSERTHRLEHISCYSCYSGLYVALTHRASNTYRGLYASPTRPLYSGLYTHRASNTYRTYRSERGLTHRGLYPHEPRLYSSERCYSCYSLYSLEGLGLYCYSTYRPRGLNARGASPALAASPLYSVALASNGLGLGLYCYSPHEILELYSVALMETTHRTHRILEGLSERGLMETGLYVALVALALAGLYILESERPHEGLYVALALACYSPHEGLNLEILEGLYILEPHELEALATYRCYSLESERARGALAILETHRASNASNGLNTYRGLILEVAL

SEQ ID NO: 105 - DNA, 1096 bp, Homo sapiens
ggcacgagcagggtctcgggctagtcatggcgtccccgtctcggagactgcagactaaaccagtcattacttgtttcaagagcgttctgctaatctacacttttattttctggatcactggcgttatccttcttgcagttggcatttggggcaaggtgagcctggagaattacttttctcttttaaatgagaaggccaccaatgtccccttcgtgctcattgctactggtaccgtcattattcttttgggcacctttggttgttttgctacctgccgagcttctgcatggatgctaaaactgtatgcaatgtttctgactctcgtttttttggtcgaactggtcgctgccatcgtaggatttgttttcagacatgagattaagaacagctttaagaataattatgagaaggctttgaagcagtataactctacaggagattatagaagccatgcagtagacaagatccaaaatacgttgcattgttgtggtgtcaccgattatagagattggacagatactaattattactcagaaaaaggatttcctaagagttgctgtaaacttgaagattgtactccacagagagatgcagacaaagtaaacaatgaaggttgttttataaaggtgatgaccattatagagtcagaaatgggagtcgttgcaggaatttcctttggagttgcttgcttccaactgattggaatctttctcgcctactgcctctctcgtgccataacaaataaccagtatgagatagtgtaacccaatgtatctgtgggcctattcctctctacctttaaggacatttagggtcccccctgtgaattagaaagttgcttggctggagaactgacaacactacttactgatagaccaaaaaactacaccagtaggttgattcaatcaagatgtatgtagacctaaaactacaccaataggctgattcaatcaagatccgtgctcgcagtgggctgattcaatcaagatgtatgtttgctatgttctaagtccaccttctatcccattcatgttagatcgttgaaaccctgtatccctctgaaacactggaagagctagtaaattgtaaatgaagt

SEQ ID NO: 106 - protein, 696 aa, Homo sapiens
METALASERPRSERARGARGLEGLNTHRLYSPRVALILETHRCYSPHELYSSERVALLELEILETYRTHRPHEILEPHETRPILETHRGLYVALILELELEALAVALGLYILETRPGLYLYSVALSERLEGLASNTYRPHESERLELEASNGLLYSALATHRASNVALPRPHEVALLEILEALATHRGLYTHRVALILEILELELEGLYTHRPHEGLYCYSPHEALATHRCYSARGALASERALATRPMETLELYSLETYRALAMETPHELETHRLEVALPHELEVALGLLEVALALAALAILEVALGLYPHEVALPHEARGHISGLILELYSASNSERPHELYSASNASNTYRGLLYSALALELYSGLNTYRASNSERTHRGLYASPTYRARGSERHISALAVALASPLYSILEGLNASNTHRLEHISCYSCYSGLYVALTHRASPTYRARGASPTRPTHRASPTHRASNTYRTYRSERGLLYSGLYPHEPRLYSSERCYSCYSLYSLEGLASPCYSTHRPRGLNARGASPALAASPLYSVALASNASNGLGLYCYSPHEILELYSVALMETTHRILEILEGLSERGLMETGLYVALVALALAGLYILESERPHEGLYVALALACYSPHEGLNLEILEGLYILEPHELEALATYRCYSLESERARGALAILETHRASNASNGLNTYRGLILEVAL

SEQ ID NO: 107 - DNA, 2769 bp, Homo sapiens
ggacacggctgtggccgctgcctctacccccgccacggatcgccgggtagtaggactgcgcggctccaggctgagggtcggtccggaggcgggtgggcgcgggtctcacccggattgtccgggtggcaccgttcccggccccaccgggcgccgcgagggatcatgtctacagcctctgccgcctcctcctcctcctcgtcttcggccggtgagatgatcgaagccccttcccaggtcctcaactttgaagagatcgactacaaggagatcgaggtggaagaggttgttggaagaggagcctttggagttgtttgcaaagctaagtggagagcaaaagatgttgctattaaacaaatagaaagtgaatctgagaggaaagcgtttattgtagagcttcggcagttatcccgtgtgaaccatcctaatattgtaaagctttatggagcctgcttgaatccagtgtgtcttgtgatggaatatgctgaagggggctctttatataatgtgctgcatggtgctgaaccattgccatattatactgctgcccacgcaatgagttggtgtttacagtgttcccaaggagtggcttatcttcacagcatgcaacccaaagcgctaattcacagggacctgaaaccaccaaacttactgctggttgcaggggggacagttctaaaaatttgtgattttggtacagcctgtgacattcagacacacatgaccaataacaaggggagtgctgcttggatggcacctgaagtttttgaaggtagtaattacagtgaaaaatgtgacgtcttcagctggggtattattctttgggaagtgataacgcgtcggaaaccctttgatgagattggtggcccagctttccgaatcatgtgggctgttcataatggtactcgaccaccactgataaaaaatttacctaagcccattgagagcctgatgactcgttgttggtctaaagatccttcccagcgcccttcaatggaggaaattgtgaaaataatgactcacttgatgcggtactttccaggagcagatgagccattacagtatccttgtcagtattcagatgaaggacagagcaactctgccaccagtacaggctcattcatggacattgcttctacaaatacgagtaacaaaagtgacactaatatggagcaagttcctgccacaaatgatactattaagcgcttagaatcaaaattgttgaaaaatcaggcaaagcaacagagtgaatctggacgtttaagcttgggagcctcccgtgggagcagtgtggagagcttgcccccaacctctgagggcaagaggatgagtgctgacatgtctgaaatagaagctaggatcgccgcaaccacaggcaacggacagccaagacgtagatccatccaagacttgactgtaactggaacagaacctggtcaggtgagcagtaggtcatccagtcccagtgtcagaatgattactacctcaggaccaacctcagaaaagccaactcgaagtcatccatggacccctgatgattccacagataccaatggatcagataactccatcccaatggcttatcttacactggatcaccaactacagcctctagcaccgtgcccaaactccaaagaatctatggcagtgtttgaacagcattgtaaaatggcacaagaatatatgaaagttcaaacagaaattgcattgttattacagagaaagcaagaactagttgcagaactggaccaggatgaaaaggaccagcaaaatacatctcgcctggtacaggaacataaaaagcttttagatgaaaacaaaagcctttctacttactaccagcaatgcaaaaaacaactagaggtcatcagaagtcagcagcagaaacgacaaggcacttcatgattctctgggaccgttacattttgaaatatgcaaagaaagactttttttttaaggaaaggaaaaccttataatgacgattcatgagtgttagctttttggcgtgttctgaatgccaactgcctatatttgctgcatttttttcattgtttattttccttttctcatggtggacatacaattttactgtttcattgcataacatggtagcatctgtgacttgaatgagcagcactttgcaacttcaaaacagatgcagtgaactgtggctgtatatgcatgctcattgtgtgaaggctagcctaacagaacaggaggtatcaaactagctgctatgtgcaaacagcgtccattttttcatattagaggtggaacctcaagaatgactttattcttgtatctcatctcaaaatattaataatttttttcccaaaagatggtatataccaagttaaagacagggtattataaatttagagtgattggtggtatattacggaaatacggaacctttagggatagttccgtgtaagggctttgatgccagcatccttggatcagtactgaactcagttccatccgtaaaatatgtaaaggtaagtggcagctgctctatttaatgaaagcagttttaccggattttgttagactaaaatttgattgtgatacattgaacaaaatggaactcatttttttttaaggagtaaagatttttaattctgtgattgtgtgtatgtgtgttgaaactgtaaagcttttatgactctaatattaatctcttaaatgaaattaaaaggcaaaagaacatgattgagcttaaatgatcatttcttcctgcagtgattcttggattgttttctcatgtatttg

SEQ ID NO: 108 - protein, 1615 aa, Homo sapiens
METSERTHRALASERALAALASERSERSERSERSERSERSERALAGLYGLMETILEGLALAPRSERGLNVALLEASNPHEGLGLILEASPTYRLYSGLILEGLVALGLGLVALVALGLYARGGLYALAPHEGLYVALVALCYSLYSALALYSTRPARGALALYSASPVALALAILELYSGLNILEGLSERGLSERGLARGLYSALAPHEILEVALGLLEARGGLNLESERARGVALASNHISPRASNILEVALLYSLETYRGLYALACYSLEASNPRVALCYSLEVALMETGLTYRALAGLGLYGLYSERLETYRASNVALLEHISGLYALAGLPRLEPRTYRTYRTHRALAALAHISALAMETSERTRPCYSLEGLNCYSSERGLNGLYVALALATYRLEHISSERMETGLNPRLYSALALEILEHISARGASPLELYSPRPRASNLELELEVALALAGLYGLYTHRVALLELYSILECYSASPPHEGLYTHRALACYSASPILEGLNTHRHISMETTHRASNASNLYSGLYSERALAALATRPMETALAPRGLVALPHEGLGLYSERASNTYRSERGLLYSCYSASPVALPHESERTRPGLYILEILELETRPGLVALILETHRARGARGLYSPRPHEASPGLILEGLYGLYPRALAPHEARGILEMETTRPALAVALHISASNGLYTHRARGPRPRLEILELYSASNLEPRLYSPRILEGLSERLEMETTHRARGCYSTRPSERLYSASPPRSERGLNARGPRSERMETGLGLILEVALLYSILEMETTHRHISLEMETARGTYRPHEPRGLYALAASPGLPRLEGLNTYRPRCYSGLNTYRSERASPGLGLYGLNSERASNSERALATHRSERTHRGLYSERPHEMETASPILEALASERTHRASNTHRSERASNLYSSERASPTHRASNMETGLGLNVALPRALATHRASNASPTHRILELYSARGLEGLSERLYSLELELYSASNGLNALALYSGLNGLNSERGLSERGLYARGLESERLEGLYALASERARGGLYSERSERVALGLSERLEPRPRTHRSERGLGLYLYSARGMETSERALAASPMETSERGLILEGLALAARGILEALAALATHRTHRGLYASNGLYGLNPRARGARGARGSERILEGLNASPLETHRVALTHRGLYTHRGLPRGLYGLNVALSERSERARGSERSERSERPRSERVALARGMETILETHRTHRSERGLYPRTHRSERGLLYSPRTHRARGSERHISPRTRPTHRPRASPASPSERTHRASPTHRASNGLYSERASPASNSERILEPRMETALATYRLETHRLEASPHISGLNLEGLNPRLEALAPRCYSPRASNSERLYSGLSERMETALAVALPHEGLGLNHISCYSLYSMETALAGLNGLTYRMETLYSVALGLNTHRGLILEALALELELEGLNARGLYSGLNGLLEVALALAGLLEASPGLNASPGLLYSASPGLNGLNASNTHRSERARGLEVALGLNGLHISLYSLYSLELEASPGLASNLYSSERLESERTHRTYRTYRGLNGLNCYSLYSLYSGLNLEGLVALILEARGSERGLNGLNGLNLYSARGGLNGLYTHRSER

SEQ ID NO: 109 - DNA, 1268 bp, Rattus norvegicus
gaggttgtgctggggctccgcgcggcctgcagtcccgggcccgcgacgcgcgccgcccgcccgccatggagcctggccccgacggcccagccgcgcccggccccgccgccatccgtgagggttggttccgagagacctgcagcctgtggcctggccaggccctgtcgctgcaagtggagcagctgctgcaccaccggcgctcgcggtaccaagacatcctcgtcttccgcagtaaaacctacggcaacgtgctggttctggatggcgtcatccagtgtaccgagagggacgagttctcctaccaggagatgatagccaacctgccgctctgcagccaccccaacccgcggaaggtgctgatcatcgggggtggagatgggggcgtcctacgggaagtggtgaagcacccctctgtggagtctgtggtccagtgcgagatcgatgaggatgtcattgaggtctctaagaagttcctgcctggcatggccgttggctactccagctcaaagctgactctccacgtgggcgatggctttgagttcatgaagcagaaccaagatgcctttgatgtcatcatcaccgactcctcagaccccatgggccctgctgagagcctcttcaaggagtcctattaccagctcatgaagacagccctcaaagaagatggcatcctctgttgccagggcgagtgccagtggctgcacctggacctcatcaaggagatgaggcatttctgcaagtctctcttccctgtggtgagctatgcctactgtaccattcccacctatcccagtggccagatcggcttcatgctgtgtagcaaaaacccgagcaccaacttccgggagcccgtgcagcagctgacacaggcccaggtagagcagatgcagctgaagtactataactcagacatgcaccgcgcggccttcgtgctgccagagttcacccgaaaggccctgaatgacataagctgaatccagtgccactgtaacaccacccgagacctcagttggattggaccaaggagcttccaagctgtctgggaccaccagtcctggaccaaactcccagatgactcttgcccaccaaccaagtgttacaggccccagaatgctgcctggcctgccctgctgggtggactcagtctctgtgtctgtctatctctgtggcgttcagccccacgcctataccagctctgtacagcaccacctatgccctgtgacccaacaaaaaacacgtgtatttataacaaaaaaaaaaaaaaaaaa

SEQ ID NO: 110 - protein, 838 aa, Rattus norvegicus
METGLPRGLYPRASPGLYPRALAALAPRGLYPRALAALAILEARGGLGLYTRPPHEARGGLTHRCYSSERLETRPPRGLYGLNALALESERLEGLNVALGLGLNLELEHISHISARGARGSERARGTYRGLNASPILELEVALPHEARGSERLYSTHRTYRGLYASNVALLEVALLEASPGLYVALILEGLNCYSTHRGLARGASPGLPHESERTYRGLNGLMETILEALAASNLEPRLECYSSERHISPRASNPRARGLYSVALLEILEILEGLYGLYGLYASPGLYGLYVALLEARGGLVALVALLYSHISPRSERVALGLSERVALVALGLNCYSGLILEASPGLASPVALILEGLVALSERLYSLYSPHELEPRGLYMETALAVALGLYTYRSERSERSERLYSLETHRLEHISVALGLYASPGLYPHEGLPHEMETLYSGLNASNGLNASPALAPHEASPVALILEILETHRASPSERSERASPPRMETGLYPRALAGLSERLEPHELYSGLSERTYRTYRGLNLEMETLYSTHRALALELYSGLASPGLYILELECYSCYSGLNGLYGLCYSGLNTRPLEHISLEASPLEILELYSGLMETARGHISPHECYSLYSSERLEPHEPRVALVALSERTYRALATYRCYSTHRILEPRTHRTYRPRSERGLYGLNILEGLYPHEMETLECYSSERLYSASNPRSERTHRASNPHEARGGLPRVALGLNGLNLETHRGLNALAGLNVALGLGLNMETGLNLELYSTYRTYRASNSERASPMETHISARGALAALAPHEVALLEPRGLPHETHRARGLYSALALEASNASPILESER

SEQ ID NO: 111 - DNA, 1282 bp, Mus musculus
cgggttgtgctgggggggtccgcgcgccctgcagtcccgaacccgctacgcgctccgtcggcccgcccgcccgccatggagcctggccccgacggcccagccgcgcccggccccgccgccatccgtgagggctggttccgagagacctgcagcctgtggcccggccaggccctgtcgctgcaagtggagcagctgcttcaccaccggcgatcgcggtaccaagacatcctcgtcttccgcagtaaaacctacggcaacgtgctggttctggatggcgtcatccagtgtactgagagggatgagttctcctaccaggagatgatcgccaacctgccgctctgcagccaccccaacccgcggaaggtgctgatcatcgggggtggagatgggggcgtcctacgggaagtggtgaagcacccctctgtggagtcggtggtccagtgcgagattgatgaggatgtcattgaagtctctaagaagttcctgcctggcatggccgttggcttctccagctcaaagctgactctccacgtgggcgatggctttgagttcatgaaacagaaccaagatgcctttgacgtcatcatcaccgactcctcagaccccatgggccctgctgagagcctcttcaaggagtcctattaccagctcatgaagacagcactcaaagaagatggcatcctgtgctgccagggtgagtgccagtggctgcacctggacctcatcaaggagatgaggcacttctgcaaatctctcttccccgtggtggactacgcctactgtagcattcctacctatcccagcggccagatcggcttcatgctgtgtagcaaaaacccgagcaccaacttccgggagccagtgcagcagttgacacaggcccaggtggagcagatgcagctgaaatactataactcggacatgcaccgtgccgccttcgtactgcctgagttcacccggaaggccctcaatgacataagctgaatccaggtgccactgtgacaccacccgagacctcaatcggattggaccaaggatcttccaagttgtctggggaccaccagtcctggaccagactcccagatgactcttgcccaccaaccaagtgttacaggccccatgatgctgcctggcctggcctggcctggcctggcctggcctgccctgctgggtggactcagtctctgtctgtctatctctgtggcgttcagccccacgcctataccagctctgtacagcaccgcctatgccctgtgacccaacaaaatacatgtgtattccg

SEQ ID NO: 112 - protein, 838 aa, Mus musculus
METGLPRGLYPRASPGLYPRALAALAPRGLYPRALAALAILEARGGLGLYTRPPHEARGGLTHRCYSSERLETRPPRGLYGLNALALESERLEGLNVALGLGLNLELEHISHISARGARGSERARGTYRGLNASPILELEVALPHEARGSERLYSTHRTYRGLYASNVALLEVALLEASPGLYVALILEGLNCYSTHRGLARGASPGLPHESERTYRGLNGLMETILEALAASNLEPRLECYSSERHISPRASNPRARGLYSVALLEILEILEGLYGLYGLYASPGLYGLYVALLEARGGLVALVALLYSHISPRSERVALGLSERVALVALGLNCYSGLILEASPGLASPVALILEGLVALSERLYSLYSPHELEPRGLYMETALAVALGLYPHESERSERSERLYSLETHRLEHISVALGLYASPGLYPHEGLPHEMETLYSGLNASNGLNASPALAPHEASPVALILEILETHRASPSERSERASPPRMETGLYPRALAGLSERLEPHELYSGLSERTYRTYRGLNLEMETLYSTHRALALELYSGLASPGLYILELECYSCYSGLNGLYGLCYSGLNTRPLEHISLEASPLEILELYSGLMETARGHISPHECYSLYSSERLEPHEPRVALVALASPTYRALATYRCYSSERILEPRTHRTYRPRSERGLYGLNILEGLYPHEMETLECYSSERLYSASNPRSERTHRASNPHEARGGLPRVALGLNGLNLETHRGLNALAGLNVALGLGLNMETGLNLELYSTYRTYRASNSERASPMETHISARGALAALAPHEVALLEPRGLPHETHRARGLYSALALEASNASPILESER

SEQ ID NO: 113 - DNA, 1235 bp, Homo sapiens
ggcggagctggtcccgttgtgctgcggcgccgcgcggcctgcagtcccgggcccgcgccccgcgccgcccgcccgcccgccatggagcccggccccgacggccccgccgcctccggccccgccgccatccgcgagggctggttccgcgagacctgcagcctgtggcccggccaggccctgtcactgcaggtggagcagctgctccaccaccggcgctcgcgctaccaggacatcctcgtcttccgcagtaagacctatggcaacgtgctggtgttggacggtgtcatccagtgcacggagagagacgagttctcctaccaggagatgatcgccaacctgcctctctgcagccaccccaacccgcgaaaggtgctgatcatcgggggcggagatggaggtgtcctgcgggaggtggtgaagcacccctccgtggagtccgtggtccagtgtgagatcgacgaggatgtcatccaagtctccaagaagttcctgccaggcatggccattggctactctagctcgaagctgaccctacatgtgggtgacggttttgagttcatgaaacagaatcaggatgccttcgacgtgatcatcactgactcctcagaccccatgggccccgccgaaagtctcttcaaggagtcctattaccagctcatgaagacagccctcaaggaagatggtgtcctctgctgccagggcgagtgccagtggctgcacctggacctcatcaaggagatgcggcagttctgccagtccctgttccccgtggtggcctatgcctactgcaccatccccacctaccccagcggccagatcggcttcatgctgtgcagcaagaacccgagcacgaacttccaggagccggtgcagccgctgacacagcagcaggtggcgcagatgcagctgaagtactacaactccgacgtgcaccgcgccgcctttgtgctgcccgagtttgcccgcaaggccctgaatgatgtgagctgagcccaggcgccaccactgatgccacccaggacctcggaccttggagcctgcggggtgcctcggcccctccagccccgggccggacctcctgctggctctcgcccaccaaccaagtgttacaagccccagaatgctgcccggcctgccctgctgggcggactgtctgtgtgtctgtctctctggcgttccacctccaagcctataccagctgtgtacagcgccatctctctgccttctgttgcccc

SEQ ID NO: 114 - protein, 840 aa, Homo sapiens
METGLPRGLYPRASPGLYPRALAALASERGLYPRALAALAILEARGGLGLYTRPPHEARGGLTHRCYSSERLETRPPRGLYGLNALALESERLEGLNVALGLGLNLELEHISHISARGARGSERARGTYRGLNASPILELEVALPHEARGSERLYSTHRTYRGLYASNVALLEVALLEASPGLYVALILEGLNCYSTHRGLARGASPGLPHESERTYRGLNGLMETILEALAASNLEPRLECYSSERHISPRASNPRARGLYSVALLEILEILEGLYGLYGLYASPGLYGLYVALLEARGGLVALVALLYSHISPRSERVALGLSERVALVALGLNCYSGLILEASPGLASPVALILEGLNVALSERLYSLYSPHELEPRGLYMETALAILEGLYTYRSERSERSERLYSLETHRLEHISVALGLYASPGLYPHEGLPHEMETLYSGLNASNGLNASPALAPHEASPVALILEILETHRASPSERSERASPPRMETGLYPRALAGLSERLEPHELYSGLSERTYRTYRGLNLEMETLYSTHRALALELYSGLASPGLYVALLECYSCYSGLNGLYGLCYSGLNTRPLEHISLEASPLEILELYSGLMETARGGLNPHECYSGLNSERLEPHEPRVALVALALATYRALATYRCYSTHRILEPRTHRTYRPRSERGLYGLNILEGLYPHEMETLECYSSERLYSASNPRSERTHRASNPHEGLNGLPRVALGLNPRLETHRGLNGLNGLNVALALAGLNMETGLNLELYSTYRTYRASNSERASPVALHISARGALAALAPHEVALLEPRGLPHEALAARGLYSALALEASNASPVALSER

SEQ ID NO: 115 - DNA, 2195 bp, Homo sapiens
atgaaatgggtcttggcaaaactattcaatcaattacattcctctatgaaatccttctgactggtataagaggacctttcctgattattgctccactttctactattgcaaactgggagagagaatttcgtacgtggactgatattaacgttgtggtttatcatgggagcctgattagcagacaaatgatacagcaatacgagatgtacttcagggattcacaggggcgtatcattcgaggagcttacagattccaagccatcatcaccacttttgaaatgattcttggaggctgtggagagcttaatgcaattgaatggcgatgtgtgattattgatgaagcacataggttaaaaaataaaaattgtaaactcttagagggcctgaaactcatgaatctggaacacaaggtgcttttgactggcacccctctccaaaatacagttgaagaactatttagtcttcttcactttcttgaacccttaaggtttccttctgaatcaacatttatgcaagaatttggggatctgaaaacagaggaacaggtacagaaacttcaggttatcctgaaaccaatgatgttgagacgattaaaagaagatgtggaaaagaagttggcacctaaagaagaaaccatcattgaagtagaacttactaatattcaaaagaaatactaccgggctatcttggaaaagaacttttcttttttatccaaaggagcaggacaaactaatgtacctaacttggtcaataccatgatggagctcaggaaatgttgtaatcatccatatcttataaaaggtgctgaggagaaaatacttggagaatttagagatacttacaatccagctgcttctgattttcatcttcaagcaatgatccagtctgctggtaaattggtccttattgataaattgcttcccaaaatgaaagccggaggtcataaagtgctcatcttctctcaaatggttcgttgccttgacattctggaggactatctcatacataaaagatacttatatgagcgaattgatggcagagtcagaggaaatcttcggcaagctgctatagatagatttagtaaacctgattcagatagatttgtttttctcctgtgtacccgagctggtgggttgggcatcaacttaactgcagctgatacatgtataatttttgattctgattggaatcctcagaatgatcttcaggcccaagctcgttgccacagaattggtcagaacaaagcagttaaagtctacagactggtaactcgtaactcatatgagagagagatgtttgaccgagccagtttgaaactgggcctagataaagctgtgttacagagcatgagtggaagagaaagtaatgttggtggtattcagcagctttccaaaaaggaaatagaagatctgcttcgaagaggtgcttatggtgctattatggaggaagaagatgaaggctctaaattctgcgaagaggatatcgatcagattttactacgtcgtacaaaaactattacaattgaatcagaaggacgtgggtcaacatttgccaaggcgagttttgtggcatctggaaaccggacagatatttctttagatgatcccaacttctggcaaaaatgggctaaaaaggcagaaatagatatagaggccatcagtggcagaaacggcttggttattgacactccaagaattaggaagcaaacaagaccttttagtgccacaaaagatgaattggctgaattatctgaagctgaaagtgaaggagatgaaaagcccaaactccggagaccctgtgaccgttccaatggctatggaagaactgaatgctttagagttgagaaaaacctgctagtttatgggtggggccgatggagagagattctatctcatggccgtttcaaaaggcagctaaatgaacacgatgtagagataatttgccgagctctcttagcatattgccttgttcactaccgaggagatgagaagattaaaggtttcatatgggatctcattactccaactgaagatggacagacacgagagctacagaatcatctaggcctatcagctcctgtacccaggggtcgaaaagggaagaaagtaaaaactcaaacaagctcatttgatatacaaaaagcagaatggcttcgaaaatataatcccgagcagctccttcaagatgaaggctac

SEQ ID NO: 116 - protein, 2025 aa, Homo sapiens
METGLYLEGLYLYSTHRILEGLNSERILETHRPHELETYRGLILELELETHRGLYILEARGGLYPRPHELEILEILEALAPRLESERTHRILEALAASNTRPGLARGGLPHEARGTHRTRPTHRASPILEASNVALVALVALTYRHISGLYSERLEILESERARGGLNMETILEGLNGLNTYRGLMETTYRPHEARGASPSERGLNGLYARGILEILEARGGLYALATYRARGPHEGLNALAILEILETHRTHRPHEGLMETILELEGLYGLYCYSGLYGLLEASNALAILEGLTRPARGCYSVALILEILEASPGLALAHISARGLELYSASNLYSASNCYSLYSLELEGLGLYLELYSLEMETASNLEGLHISLYSVALLELETHRGLYTHRPRLEGLNASNTHRVALGLGLLEPHESERLELEHISPHELEGLPRLEARGPHEPRSERGLSERTHRPHEMETGLNGLPHEGLYASPLELYSTHRGLGLGLNVALGLNLYSLEGLNVALILELELYSPRMETMETLEARGARGLELYSGLASPVALGLLYSLYSLEALAPRLYSGLGLTHRILEILEGLVALGLLETHRASNILEGLNLYSLYSTYRTYRARGALAILELEGLLYSASNPHESERPHELESERLYSGLYALAGLYGLNTHRASNVALPRASNLEVALASNTHRMETMETGLLEARGLYSCYSCYSASNHISPRTYRLEILELYSGLYALAGLGLLYSILELEGLYGLPHEARGASPTHRTYRASNPRALAALASERASPPHEHISLEGLNALAMETILEGLNSERALAGLYLYSLEVALLEILEASPLYSLELEPRLYSMETLYSALAGLYGLYHISLYSVALLEILEPHESERGLNMETVALARGCYSLEASPILELEGLASPTYRLEILEHISLYSARGTYRLETYRGLARGILEASPGLYARGVALARGGLYASNLEARGGLNALAALAILEASPARGPHESERLYSPRASPSERASPARGPHEVALPHELELECYSTHRARGALAGLYGLYLEGLYILEASNLETHRALAALAASPTHRCYSILEILEPHEASPSERASPTRPASNPRGLNASNASPLEGLNALAGLNALAARGCYSHISARGILEGLYGLNASNLYSALAVALLYSVALTYRARGLEVALTHRARGASNSERTYRGLARGGLMETPHEASPARGALASERLELYSLEGLYLEASPLYSALAVALLEGLNSERMETSERGLYARGGLSERASNVALGLYGLYILEGLNGLNLESERLYSLYSGLILEGLASPLELEARGARGGLYALATYRGLYALAILEMETGLGLGLASPGLGLYSERLYSPHECYSGLGLASPILEASPGLNILELELEARGARGTHRLYSTHRILETHRILEGLSERGLGLYARGGLYSERTHRPHEALALYSALASERPHEVALALASERGLYASNARGTHRASPILESERLEASPASPPRASNPHETRPGLNLYSTRPALALYSLYSALAGLILEASPILEGLALAILESERGLYARGASNGLYLEVALILEASPTHRPRARGILEARGLYSGLNTHRARGPRPHESERALATHRLYSASPGLLEALAGLLESERGLALAGLSERGLGLYASPGLLYSPRLYSLEARGARGPRCYSASPARGSERASNGLYTYRGLYARGTHRGLCYSPHEARGVALGLLYSASNLELEVALTYRGLYTRPGLYARGTRPARGGLILELESERHISGLYARGPHELYSARGGLNLEASNGLHISASPVALGLILEILECYSARGALALELEALATYRCYSLEVALHISTYRARGGLYASPGLLYSILELYSGLYPHEILETRPASPLEILETHRPRTHRGLASPGLYGLNTHRARGGLLEGLNASNHISLEGLYLESERALAPRVALPRARGGLYARGLYSGLYLYSLYSVALLYSTHRGLNTHRSERSERPHEASPILEGLNLYSALAGLTRPLEARGLYSTYRASNPRGLGLNLELEGLNASPGLGLYTYR

SEQ ID NO: 117 - DNA, 10 bp, Artificial
  Oligonucleotide Primer
tacaacgagg

SEQ ID NO: 118 - DNA, 10 bp, Artificial
  Oligonucleotide Primer
tggattggtc

SEQ ID NO: 119 - DNA, 10 bp, Artificial
  Oligonucleotide Primer
ctttctaccc

SEQ ID NO: 120 - DNA, 10 bp, Artificial
  Oligonucleotide Primer
ttttggctcc

SEQ ID NO: 121 - DNA, 10 bp, Artificial
  Oligonucleotide Primer
ggaaccaatc

SEQ ID NO: 122 - DNA, 10 bp, Artificial
  Oligonucleotide Primer
aaactccgtc

SEQ ID NO: 123 - DNA, 10 bp, Artificial
  Oligonucleotide Primer
tcgatacagg

SEQ ID NO: 124 - DNA, 10 bp, Artificial
  Oligonucleotide Primer
tggtaaaggg

SEQ ID NO: 125 - DNA, 10 bp, Artificial
  Oligonucleotide Primer
tcggtcatag

SEQ ID NO: 126 - DNA, 10 bp, Artificial
  Oligonucleotide Primer
ggtactaagg

SEQ ID NO: 127 - DNA, 10 bp, Artificial
  Oligonucleotide Primer
tacctaagcg

SEQ ID NO: 128 - DNA, 10 bp, Artificial
  Oligonucleotide Primer
ctgcttgatg

SEQ ID NO: 129 - DNA, 10 bp, Artificial
  Oligonucleotide Primer
gttttcgcag

SEQ ID NO: 130 - DNA, 10 bp, Artificial
  Oligonucleotide Primer
gatcaagtcc

SEQ ID NO: 131 - DNA, 10 bp, Artificial
  Oligonucleotide Primer
gatccagtac

SEQ ID NO: 132 - DNA, 10 bp, Artificial
  Oligonucleotide Primer
gatcacgtac

SEQ ID NO: 133 - DNA, 10 bp, Artificial
  Oligonucleotide Primer
gatctgacac

SEQ ID NO: 134 - DNA, 10 bp, Artificial
  Oligonucleotide Primer
gatctcagac

SEQ ID NO: 135 - DNA, 10 bp, Artificial
  Oligonucleotide Primer
gatcatagcc

SEQ ID NO: 136 - DNA, 10 bp, Artificial
  Oligonucleotide Primer
gatcaatcgc

SEQ ID NO: 137 - DNA, 10 bp, Artificial
  Oligonucleotide Primer
gatctaaccg

SEQ ID NO: 138 - DNA, 10 bp, Artificial
  Oligonucleotide Primer
gatcgcattg

SEQ ID NO: 139 - DNA, 10 bp, Artificial
  Oligonucleotide Primer
gatctgactg

SEQ ID NO: 140 - DNA, 10 bp, Artificial
  Oligonucleotide Primer
gatcatggtc

SEQ ID NO: 141 - DNA, 10 bp, Artificial
  Oligonucleotide Primer
gatcatagcg

SEQ ID NO: 142 - DNA, 10 bp, Artificial
  Oligonucleotide Primer
gatctaaggc

SEQ ID NO: 143 - DNA, 24 bp, Artificial
  Oligonucleotide Primer
acgactcactatagggcgaattgg

SEQ ID NO: 144 - DNA, 24 bp, Artificial
  Oligonucleotide Primer
acacaggaaacagctatgaccatg

SEQ ID NO: 145 - DNA, 57 bp, Artificial
  Oligonucleotide Primer
aaacgacggccagtgaattgtaatacgactcactataggcgcttttttttttttttt

SEQ ID NO: 146 - DNA, 14 bp, Artificial
  Oligonucleotide Primer
ttttttttttttaa

SEQ ID NO: 147 - DNA, 14 bp, Artificial
  Oligonucleotide Primer
ttttttttttttat

SEQ ID NO: 148 - DNA, 13 bp, Artificial
  Oligonucleotide Primer
tttttttttttac

SEQ ID NO: 149 - DNA, 13 bp, Artificial
  Oligonucleotide Primer
tttttttttttag

SEQ ID NO: 150 - DNA, 13 bp, Artificial
  Oligonucleotide Primer
tttttttttttga

SEQ ID NO: 151 - DNA, 13 bp, Artificial
  Oligonucleotide Primer
tttttttttttgt

SEQ ID NO: 152 - DNA, 13 bp, Artificial
  Oligonucleotide Primer
tttttttttttca

SEQ ID NO: 153 - DNA, 13 bp, Artificial
  Oligonucleotide Primer
tttttttttttct

SEQ ID NO: 154 - DNA, 12 bp, Artificial
  Oligonucleotide Primer
ttttttttttgc

SEQ ID NO: 155 - DNA, 12 bp, Artificial
  Oligonucleotide Primer
ttttttttttgg

SEQ ID NO: 156 - DNA, 12 bp, Artificial
  Oligonucleotide Primer
ttttttttttcc

SEQ ID NO: 157 - DNA, 12 bp, Artificial
  Oligonucleotide Primer
ttttttttttcg

1. Method for discovering pain-regulating substances having the following process steps:
(a) incubation of a substance to be tested under appropriate conditions with a cell and/or a preparation from such a cell, which has synthesised a peptide or protein selected from the following group:
JNK3, PIM-2, LR-11, TFIIFβ, GGT-β, GATA3, CLC-7, catalase, tetraspanin (TM4SF/TSPAN-6/TM4-D), casein kinase 1a, MAP3K7/TAK-1 (TGF-β activated kinase), BAB14112 and/or spermidine synthase,
a peptide or protein which, or a part of which, is encoded by a polynucleotide according to any of FIGS. 34a), 34c), 34e), 34g), 35a), 35c), 35e), 36a), 36c), 37a), 37c), 38a), 38c), 39a), 39c), 39e), 40a), 40c), 40e), 41a), 41c), 41e), 42a), 42e), 43c), 43e), 44e), 45a), 45c), 45e), or 46e), or which is encoded by a polynucleotide which is at least 90% similar thereto,
a peptide or protein having an amino acid sequence according to any of FIGS. 34b), 34d), 34f), 34h), 35b), 35d), 35f), 36b), 36d), 37b), 37d), 38b), 38d), 39b), 39d), 40b), 40d), 40f), 41b), 41d), 41f), 42b), 42f), 43d), 43f), 44f), 45b), 45d), 45f) or 46f), or a peptide or protein at least 90% similar thereto
and/or a protein which is encoded by a nucleic acid which, under stringent conditions, binds to a polynucleotide according to any of FIGS. 34a), 34c), 34e), 34g), 35a), 35c), 35e), 36a), 36c), 37a), 37c), 38a), 38c), 39a), 39c), 39e), 40a), 40c), 40e), 41a), 41c), 41e), 42a), 42e), 43c), 43e), 44e), 45a), 45c), 45e), or 46e), or the antisense polynucleotide thereof,
a partial protein, at least 10 amino acids long, of any of the aforementioned proteins and/or peptides and/or
a peptide or protein which is encoded by a gene consisting of a polynucleotide, the nucleotide sequence whereof encompasses a gene fragment according to any of the sequences represented in FIGS. 1 to 33, or which is encoded by a polynucleotide at least 90% similar to such a gene,
(b) Measurement of the binding of the test substance to the peptide or protein synthesised by the cell or measurement of at least one functional parameter altered by the binding of the test substance to the peptide or protein.

2. Method according to claim 1, characterised in that the cell is genetically manipulated before step (a).

3. Method according to claim 2, characterised in that the genetic manipulation allows the measurement of at least one of the functional parameters altered by the test substance.

4. Method according to claim 3, characterised in that a form of a G protein not endogenously expressed in the cell is expressed as a result of the genetic manipulation, or in that a reporter gene is introduced.

5. Method according to any of claims 2 to 4, characterised in that the cell is genetically manipulated in such a way that the cell contains at least one polynucleotide according to any of FIGS. 34a), 34c), 34e), 34g), 35a), 35c), 35e), 36a), 36c), 37a), 37c), 38a), 38c), 39a), 39c), 39e), 40a), 40c), 40e), 41a), 41c), 41e), 42a), 42e), 43c), 43e), 44e), 45a), 45c), 45e), or 46e) or a polynucleotide at least 90% similar thereto, or a polynucleotide from the coding sequence of a gene which encompasses a gene fragment according to any of the sequences represented in FIGS. 1 to 33, or a polynucleotide at least 90% similar thereto.

6. Method according to claim 5, characterised in that the polynucleotide is contained in a recombinant DNA construct.

7. Method according to any of claims 2 to 6, characterised in that after the genetic manipulation according to claim 2 and before step (a) according to claim 1, the cell is cultivated under conditions which allow expression, optionally under selection pressure.

8. Method according to any of claims 1 to 7, characterised in that the cell is an amphibian cell, a bacterial cell, a yeast cell, an insect cell or an immortalised or native mammalian cell.

9. Method according to any of claims 1 to 8, characterised in that measurement of the binding takes place via the suppression of a known labelled ligand of the peptide or protein according to claim 1 and/or via the activity bound thereto of a labelled test substance

10. Method according to any of claims 1 to 8, characterised in that the measurement of at least one of the functional parameters altered by the test substance takes places by means of measuring the regulation, inhibition and/or activation of receptors, ion channels and/or enzymes, in particular by means of measuring the alteration in gene expression, the ion concentration, the pH or the membrane potential via change in the enzyme activity or the concentration of the 2^{nd} messenger.

11. Method according to any of claims 1 to 10, characterised in that the peptide or protein in steps (a) and (b) is selected from the following groups:
JNK3, PIM-2, LR-11, TFIIFβ, GGT-β, GATA3, CLC-7, catalase, tetraspanin (TM4SF/TSPAN-6/TM4-D), casein kinase 1a , MAP3K7/TAK-1 (TGF-β activated kinase), BAB14112 and/or spermidine synthase,
a peptide or protein which, or a part of which, is encoded by a polynucleotide according to any of FIGS. 34a), 34c), 34e), 34g), 35a), 35c), 35e), 36a), 36c), 37a), 37c), 38a), 38c), 39a), 39c), 39e), 40a), 40c), 40e), 41a), 41c), 41e), 42a), 42e), 43c), 43e), 44e), 45a), 45c), 45e), or 46e), or which is encoded by a polynucleotide which is at least 90%, preferably 95%, in particular 97% similar thereto or
a peptide or protein having an amino acid sequence according to any of FIGS. 34b), 34d), 34f), 34h), 35b), 35d), 35f), 36b), 36d, 37b), 37d), 38b), 38d), 39b), 39d), 40b), 40d), 40f), 41b), 41d), 41f), 42b), 42f), 43d), 43f), 44f), 45b), 45d), 45f) or 46f) or a peptide or protein at least 90%, preferably 95%, in particular 97% similar thereto,
and/or a protein which is encoded by a nucleic acid which, under stringent conditions, binds to a polynucleotide according to any of FIGS. 34a), 34c), 34e), 34g), 35a), 35c), 35e), 36a), 36c), 37a), 37c), 38a), 38c), 39a), 39c), 39e), 40a), 40c), 40e), 41a), 41c), 41e), 42a), 42e), 43c), 43e), 44e), 45a), 45c), 45e), or 46e), or the antisense polynucleotide thereof and/or
a partial protein at least 10, preferably 15, in particular at least 20 amino acids long, of any of the aforementioned proteins and/or peptides.

12. Method according to any of claims 1 to 10, characterised in that a gene consisting of a polynucleotide which encompasses a gene fragment according to any of the sequences represented in FIGS. 1, 3-8, 10, 11, 13, 14, 15, 17-27 or 31-33, or a polynucleotide at least 90%, in particular 95%, preferably 97% similar to said gene, encodes the peptide or protein in steps (a) and (b).

13. Method according to any of claims 1 to 10, characterised in that a gene consisting of a polynucleotide which encompasses a gene fragment according to any of the sequences represented in FIGS. 2, 9, 12, 16 or 28-30, or a polynucleotide at least 90%, in particular 95%, preferably 97% similar to said gene, encodes the peptide or protein in steps (a) and (b).

14. Polynucleotide which corresponds by at least 90%, preferably 95%, in particular at least 97% to any of the nucleotide sequences represented in any of FIGS. 1 to 33 or to a polynucleotide from the coding sequence of a gene which encompasses a gene fragment according to any of FIGS. 1 to 33.

15. Polynucleotide according to claim 14, characterised in that it corresponds by at least 90%, preferably 95%, in particular at least 97% to any of the nucleotide sequences represented in any of FIGS. 1, 3-8, 10, 11, 13, 14, 15, 17-27 or 31-33, in particular 20 or 21, or to parts thereof, or to a polynucleotide from the coding sequence of a gene which encompasses a gene fragment according to any of FIGS. 1, 3-8, 10, 11, 13, 14, 15, 17-27 or 31-33, in particular 20 or 21.

16. Polynucleotide which corresponds by at least 90%, preferably 95%, in particular by at least 97% to a defined nucleic acid sequence obtainable by labelling a polynucleotide according to any of FIGS. 1 to 33 as a probe, hybridising a cDNA bank with the probe and washing under stringent conditions, and isolating and optionally sequencing the cDNA clone to which the probe has bound.

17. Polynucleotide which corresponds by at least 90%, preferably 95%, in particular by at least 97% to a defined nucleic acid sequence obtainable by determining and synthesising segments of a polynucleotide according to any of FIGS. 1 to 33 as gene-specific oligonucleotide primers, with which the extended polynucleotide is then generated and optionally sequenced by means of PCR using single or double-stranded DNA, cDNA libraries or genomic DNA as a template.

18. Polynucleotide according to either of claims 16 or 17, characterised in that a polynucleotide according to any of FIGS. 1, 3-8, 10, 11, 13, 14, 15, 17-27 or 31-33, in particular 20 or 21, is used.

19. Polynucleotide according to any of claims 14 to 18, characterised in that it is RNA or single or double-stranded DNA, in particular mRNA or cDNA.

20. Polynucleotide according to any of claims 14 to 19, characterised in that it is an antisense polynucleotide or PNA showing a sequence which is capable of specifically binding to a polynucleotide according to any of claims 14 to 19.

21. Polynucleotide according to claim 20, characterised in that it is part of a ribozyme or other DNA enzyme or of a catalytic RNA or DNA.

22. Vector containing a polynucleotide according to any of claims 14 to 21.

23. Vector according to claim 22, characterised in that it is an expression vector.

24. Vector according to either of claims 22 or 23, characterised in that the vector is derived from a virus, for example the adenovirus, adeno-associated virus or herpes virus, and/or that it contains at least one LTR, poly A, promoter and/or ORI sequence.

25. Vector according to any of claims 22 to 24, characterised in that it contains a polynucleotide according to either of claims 15 or 18.

26. Peptide, in particular oligopeptide or polypeptide, or protein encoded by a polynucleotide according to any of claims 14-19.

27. Peptide, in particular oligopeptide or polypeptide, or protein which is encoded by a polynucleotide that, under stringent conditions, hybridises with any of the polynucleotides according to FIGS. 1 to 33 or with any of the antisense polynucleotides thereof.

28. Peptide or protein according to either of claims 26 or 27, characterised in that it was modified after translation, in particular glycosylated, phosphorylated, amidated, methylated, acetylated, ADP ribosylated, hydroxylated, provided with a membrane anchor, cleaved or shortened.

29. Peptide or protein according to any of claims 26 to 28, characterised in that it is encoded by a polynucleotide according to either of claims 15 or 18.

30. Antibody for a peptide or protein according to any of claims 26 to 29.

31. Antibody according to claim 30, characterised in that it is a monoclonal or polyclonal antibody.

32. Antibody according to either of claims 30 or 31, characterised in that it is an antibody for a peptide or protein according to claim 29.

33. Cell containing a polynucleotide according to any of claims 14 to 21, a peptide or protein according to any of claims 26 to 29 and/or a vector according to any of claims 22 to 25.

34. Cell according claim 33, characterised in that the cell is an amphibian cell, a bacterial cell, a yeast cell, an insect cell or an immortalised or native mammalian cell.

35. Cell according to either of claims 33 or 34, characterised in that it contains a nucleic acid sequence according to claim 15 or 18, a peptide or protein according to claim 29 and/or a vector according to claim 25.

36. Transgenic non-human mammal, whose germ and somatic cells contain a nucleotide sequence according to any of claims 14 to 21 as the result of introducing a chromosome or chromosomes into the genome of the animal or into the genome of any of the ancestors of said animal.

37. Transgenic non-human mammal, whose embryonic and somatic cells contain any of the nucleotide sequences according to any of claims 14 to 21 as the result of chromosomal manipulation in the genome of the animal or in the genome of any of the ancestors of said animal, the sequence no longer being in expressible form.

38. Transgenic non-human mammal, according to either of claims 36 or 37, characterised in that it is a rodent.

39. Transgenic non-human mammal, according to any of claims 36 to 38, characterised in that the nucleotide sequence corresponds to claim 15 or 18.

40. Compound identifiable as a pain-regulating substance by means of a method according to any of claims 1 to 13.

41. Compound according to claim 40, characterised in that the compound is identifiable as a pain-regulating substance by means of a method according to claim 11.

42. Compound according to claim 40, characterised in that the compound is identifiable as a pain-regulating substance by means of a method according to claim 12.

43. Compound according to claim 40, characterised in that the compound is identifiable as a pain-regulating substance by means of a method according to claim 13.

44. Active ingredient characterised in that it binds to a peptide or protein according to any of claims 26 to 29.

45. Active ingredient according to claim 44, characterised in that it is a low-molecular active ingredient.

46. Active ingredient according to either of claims 44 or 45, characterised in that it binds to a peptide or protein according to claim 29.

47. Medicament containing at least one polynucleotide according to any of claims 14-21, a peptide or protein according to any of claims 26 to 29, a vector according to any of claims 22 to 25, an antibody according to any of claims 30 to 32, a cell according to any of claims 33 to 35, a compound according to any of claims 40 to 43 and/or an active ingredient according to any of claims 44 to 46, and, optionally, appropriate auxiliary and/or supplementary ingredients.

48. Medicament according to claim 47, characterised in that it contains a polynucleotide according to either of claims 15 or 18, a peptide or protein according to claim 29, a vector according to claim 25, an antibody according to claim 32, a cell according to claim 35, a compound according to either of claims 41 or 42 and/or an active ingredient according to claim 46.

49. Medicament according to either of claims 47 or 48, characterised in that it contains a compound according to claim 41.

50. Medicament according to either of claims 47 or 48, characterised in that it contains a compound according to claim 42 and/or an active ingredient according to claim 46.

51. Diagnostic reagent containing at least one polynucleotide according to any of claims 14-21 or parts thereof a peptide or protein according to any of claims 26 to 29 or parts thereof a vector according to any of claims 22 to 25, an antibody according to any of claims 30 to 32 or parts thereof and/or a cell according to any of claims 33 to 35 and, optionally, appropriate supplementary ingredients.

52. Diagnostic reagent according to claim 51, characterised in that it contains a polynucleotide according to either of claims 15 or 18 or parts thereof, a peptide or protein according to claim 29 or parts thereof, a vector according to claim 25, an antibody according to claim 32 and/or a cell according to claim 35.

53. Diagnostic reagent according to either of claims 51 or 52, characterised in that it contains a polynucleotide according to claim 20.

54. Use of a polynucleotide according to any of claims 14 to 21, a peptide or protein according to any of claims 26-29, a vector according to any of claims 22-25, an antibody according to any of claims 30-32, a cell according to any of claims 33-35, a compound according to any of claims 40-43, an active ingredient according to any of claims 44-46 and/or an active ingredient which binds to a peptide or protein selected from the following group:
JNK3, PIM-2, LR-11, TFIIFβ, GGT-β, GATA3, CLC-7, catalase, tetraspanin (TM4SF/TSPAN-6/TM4-D), casein kinase 1a, MAP3K7/TAK-1 (TGF-β activated kinase), BAB14112 and/or spermidine synthase,
a peptide or protein which, or a part of which, is encoded by a polynucleotide according to any of FIGS. 34a), 34c), 34e), 34g), 35a), 35c), 35e), 36a), 36c), 37a), 37c), 38a), 38c), 39a), 39c), 39e), 40a), 40c), 40e), 41a), 41c), 41e), 42a), 42e), 43c), 43e), 44e), 45a), 45c), 45e), or 46e) or which is encoded by a polynucleotide which is at least 90%, preferably 95%, in particular 97% similar thereto, or
a peptide or protein having an amino acid sequence according to any of FIGS. 34b), 34d), 34f), 34h), 35b), 35d), 35f), 36b), 36d), 37b), 37d), 38b), 38d), 39b), 39d), 40b), 40d), 40f), 41b), 41d), 41f), 42b), 42f), 43d), 43f), 44f), 45b), 45d), 45f) or 46f), or a peptide or protein at least 90%, preferably 95%, in particular 97% similar thereto
and/or a protein, which is encoded by a nucleic acid which, under stringent conditions, binds to a polynucleotide according to any of FIGS. 34a), 34c), 34e), 34g), 35a), 35c), 35e), 36a), 36c), 37a), 37c), 38a), 38c), 39a), 39c), 39e), 40a), 40c), 40e), 41a), 41c), 41e), 42a), 42e), 43c), 43e), 44e), 45a), 45c), 45e), or 46e) or to the antisense polynucleotide thereof and/or
a partial protein, at least 10, preferably 15, in particular 20 amino acids long, of one of the aforementioned proteins and/or peptides
for producing a medicament for the treatment of pain.

55. Use according to claim 54, characterised in that the treatment relates to chronic pain.

56. Use according to either of claims 54 or 55, characterised in that a polynucleotide according to either of claims 15 or 18, a peptide or protein according to claim 29, a vector according to claim 25, an antibody according to claim 32, a cell according to claim 35, a compound according to either of claims 41 or 42, an active ingredient according to claim 46 and/or an active ingredient which binds to a peptide or a protein selected from the following group is used:
JNK3, PIM-2, LR-11, TFIIFβ, GGT-β, GATA3, CLC-7, catalase, tetraspanin (TM4SF/TSPAN-6/TM4-D), casein kinase 1a, MAP3K7/TAK-1 (TGF-β activated kinase), BAB14112 and/or spermidine synthase,
a peptide or protein for which, or for a part of which a polynucleotide codes according to any of FIGS. 34a), 34c), 34e), 34g), 35a), 35c), 35e), 36a), 36c), 37a), 37c), 38a), 38c), 39a), 39c), 39e), 40a), 40c), 40e), 41a), 41c), 41e), 42a), 42e), 43c), 43e), 44e), 45a), 45c), 45e), or 46e), or a polynucleotide at least 90%, preferably 95%, in particular 97% similar thereto, or
a peptide or a protein having an amino acid sequence according to any of FIGS. 34b), 34d), 34f), 34h), 35b), 35d), 35f), 36b), 36d), 37b), 37d), 38b), 38d), 39b), 39d), 40b), 40d), 40f), 41b), 41d), 41f), 42b), 42f), 43d), 43f), 44f), 45b), 45d), 45f) or 46f), or a peptide or protein at least 90%, preferably 95%, in particular 97% similar thereto.

57. Use according to any of claims 54-56, characterised in that a compound according to claim 41 and/or an active ingredient which binds to a peptide or a protein selected from the following group is used:
JNK3, PIM-2, LR-11, TFIIFβ, GGT-β, GATA3, CLC-7, catalase, tetraspanin (TM4SF/TSPAN-6/TM4-D), casein kinase 1a, MAP3K7/TAK-1 (TGF-β activated kinase), BAB14112 and/or spermidine synthase,
a peptide or protein which, or a part of which, is encoded by a polynucleotide according to any of FIGS. 34a), 34c), 34e), 34g), 35a), 35c), 35e), 36a), 36c), 37a), 37c), 38a), 38c), 39a), 39c), 39e), 40a), 40c), 40e), 41a), 41c), 41e), 42a), 42e), 43c), 43e), 44e), 45a), 45c), 45e), or 46e), or a polynucleotide at least 90%, preferably 95%, in particular 97% similar thereto, or
a peptide or a protein having an amino acid sequence according to any of FIGS. 34b), 34d), 34f), 34h), 35b), 35d), 35f), 36b), 36d), 37b), 37d), 38b), 38d), 39b), 39d), 40b), 40d), 40f), 41b), 41d), 41f), 42b), 42f), 43d), 43f), 44f), 45b), 45d), 45f) or 46f), or a peptide or protein at least 90%, preferably 95%, in particular 97% similar thereto.

58. Use according to any of claims 54-56, characterised in that a compound according to claim 42 and/or an active ingredient according to claim 46 is used.

59. Use of a polynucleotide according to any of claims 14 to 21, a peptide or protein according to any of claims 26-29, a vector according to any of claims 22-25, an antibody according to any of claims 30-32, and/or a cell according to any of claims 33-35 for gene therapy.

60. Use according to claim 59, characterised in that it is in-vivo or in-vitro gene therapy.

61. Use according to either of claims 59 or 60, characterised in that a polynucleotide according to any of claims 16-18, preferably 18 is used.

62. Use according to either of claims 59 or 60, characterised in that a polynucleotide according to claim 15 is used.

63. Use according to either of claims 59 or 60, characterised in that a polynucleotide according to either of claims 20 or 21 is used.

64. Use of a polynucleotide according to any of claims 14 to 21, a peptide or protein according to any of claims 26-29, a vector according to any of claims 22-25, an antibody according to any of claims 30-32, a cell according to any of claims 33-35, a compound according to any of claims 40-43 and/or an active ingredient according to any of claims 44-46 for diagnosis and/or for studies of effectiveness.

65. Method for discovering pain-regulating substances having the following process steps:
(a) Incubation of a substance to be tested under appropriate conditions with a cell and/or a preparation from such a cell which has synthesised a peptide or protein which is encoded by a polynucleotide according to any of claims 16-18, preferably 18, or a polynucleotide which is at least 90%, preferably 95%, in particular 97% similar thereto,
(b) measurement of the binding of the test substance to the peptide or protein synthesised by the cell or measurement of at least one of the functional parameters altered by the binding of the test substance to the peptide or protein.

66. Method according to claim 65, characterised in that the cell is genetically manipulated before step (a).

67. Method according to claim 66, characterised in that the genetic manipulation allows the measurement of at least one of the functional parameters altered by the test substance.

68. Method according to either of claims 66 or 67, characterised in that the cell is genetically manipulated in such a way that the cell contains at least one polynucleotide according to any of claims 15-18, preferably 18, or a polynucleotide at least 90%, preferably 95%, in particular 97% similar thereto.

69. Method according to any of claims 66 to 68, characterised in that after the genetic manipulation according to claim 66 and before step (a) according to claim 65 the cell is cultivated under conditions which allow expression, optionally under selection pressure.

70. Method for the production of a peptide or protein according to any of claims 26-29, characterised in that a cell is cultivated according to any of claims 33-35, and optionally the peptide or protein is isolated.

71. Use of a peptide or protein selected from any of the following groups:
JNK3, PIM-2, LR-11, TFIIFβ, GGT-β, GATA3, CLC-7, catalase, tetraspanin (TM4SF/TSPAN-6/TM4-D), casein kinase 1a, MAP3K7/TAK-1 (TGF-β activated kinase), BAB14112 and/or spermidine synthase,
a peptide or protein, which or a part of which is encoded by a polynucleotide according to any of FIGS. 34a), 34c), 34e), 34g), 35a), 35c), 35e), 36a), 36c), 37a), 37c), 38a), 38c), 39a), 39c), 39e), 40a), 40c), 40e), 41a), 41c), 41e), 42a), 42e), 43c), 43e), 44e), 45a), 45c), 45e), or 46e) or which is encoded by a polynucleotide which is at least 90% similar thereto
a peptide or protein having an amino acid sequence according to any of FIGS. 34b), 34d), 34f), 34h), 35b), 35d), 35f), 36b), 36d), 37b), 37d), 38b), 38d), 39b), 39d), 40b), 40d), 40f), 41b), 41d), 41f), 42b), 42f), 43d), 43f), 44f), 45b), 45d), 45f) or 46f) or a peptide or protein at least 90% similar thereto
and/or a protein, which is encoded by a nucleic acid which, under stringent conditions, binds to a polynucleotide according to any of FIGS. 34a), 34c), 34e), 34g), 35a), 35c), 35e), 36a), 36c), 37a), 37c), 38a), 38c), 39a), 39c), 39e), 40a), 40c), 40e), 41a), 41c), 41e), 42a), 42e), 43c), 43e), 44e), 45a), 45c), 45e), or 46e) or to the antisense polynucleotide thereof,
a partial protein at least 10 amino acids long, of one or the aforementioned proteins and/or peptides and/or
a peptide or protein which is encoded by a gene consisting of a polynucleotide, whose nucleotide sequence encompasses a gene fragment according to any of the sequences represented in FIGS. 1 to 33, or which is encoded by a polynucleotide which is at least 90% similar to such a gene
in a method for discovering pain-regulating substances.
